(19) United States
(12) Patent Application Publication
(10) Pub. No.: US 2022/0378933 A1
(43) Pub. Date: Dec. 1, 2022

(54) IL-2 COMPOSITIONS AND METHODS OF USE THEREOF

(71) Applicant: PROVIVA THERAPEUTICS (HONG KONG) LIMITED, Admiralty, Hong Kong (CN)

(72) Inventors: Zijuan LI, Shanghai (CN); Hongxing ZHOU, Bedford, MA (US)

(73) Assignee: Proviva Therapeutics (Hong Kong) LImited, Admiralty, Hong Kong (CN)

(21) Appl. No.: 17/761,426

(22) PCT Filed: Sep. 17, 2020
(86) PCT No.: PCT/US2020/051222

§ 371 Date: Mar. 17, 2022

Related U.S. Application Data
(60) Provisional application No. 62/902,540, filed on Sep. 19, 2019.

(51) Int. Cl. A61K 47/68; A61K 47/64

(52) U.S. Cl. CPC A61K 47/6813; A61K 47/642; A61K 47/6889

(57) ABSTRACT

Provided are activatable proprotein homodimers, comprising at least two separate polypeptide chains, each chain comprising an IL-2 protein variant that has reduced binding affinity to wild-type IL-2Rα relative to that of the wild-type IL-2 sequence, a cleavable linker, and an IL-2 binding protein, among other optional features, and related pharmaceutical compositions and methods of use thereof.

### CROSS-REFERENCE TO RELATED APPLICATIONS

[0001] This application claims the benefit under 35 U.S.C. § 119(e) to U.S. Provisional Application No. 62/902,540, filed Sep. 19, 2019, which is incorporated by reference in its entirety

### STATEMENT REGARDING THE SEQUENCE LISTING

[0002] The Sequence Listing associated with this application is provided in text format in lieu of a paper copy, and is hereby incorporated by reference into the specification. The name of the text file containing the Sequence Listing is PRVA-004/01WO_ST25.txt. The text file is about 689 KB, created on Sep. 9, 2020, and is being submitted electronically via EFS-Web.

### BACKGROUND

### Technical Field

[0003] The present disclosure relates to an activatable proprotein homodimer comprising at least two separate polypeptide chains, each chain comprising an IL-2 protein variant that has reduced binding affinity to wild-type IL-2Rα relative to that of the wild-type IL-2 sequence, a cleavable linker, and an IL-2 binding protein, among other optional features, and related pharmaceutical compositions and methods of use thereof.

### Description of the Related Art

[0004] Interleukin-2 (IL-2) immunotherapy has proven utility in the treatment of cancers such as malignant melanoma and renal cell cancer, and chronic infections such as HIV infections. Despite these clinical success in the 1990s, and continued scientific interests and capital investment in an attempt to expand the clinical applications of IL-2 to other human diseases including other types of cancers (Tang and Harding, doi.org/10.1016/j.cytox.2018.100001; Wrangle et al., J Interferon & Cytokine Research, 38: 45-68, 2018) and autoimmune disorders (von Spee-Mayer et al., Ann Rheum Dis 78: 209-217, 2019), approval of broader clinical use of IL-2 has so far been limited (Mizui, M., Clinical Immunology, https:/doi.org/10.1016/j.clin.2018.1102).

[0005] There are certain problems associated with most therapies of IL-2, including engineered IL-2 and related fusion proteins. For example, natural IL-2 and engineered IL-2 in therapy have a short half-life in circulation due in part to a small size of ˜14 kD (below retention size threshold of 60-70 kD). Even when IL-2 or modified IL-2 are fused with an Fc fragment or a whole IgG, the observed half life in circulation is only between 3.7-34 hours (King et al., J Clin Oncol 22: 4463-73, 2004; Hartimath, et al., Oncotarget 9: 7162-7174 (20018), instead of days to weeks for an IgG. Because of the large number of IL-2 receptors positive cells in circulation and tissues, binding of the IL-2 domain in the fusion protein promotes target-mediated clearance and renders the intended targeting effect of the IgG fusion ineffective (Tzeng et al., PNAS. 112: 3320-5, 2015). Kinetically, expansion of IL-2R cells resulting from the activity of IL-2 drug further impacts the PK and biodistribution of IL-2 drugs and thus complicates the design of optimal drug dosing regimen (van Brummelen et al., Oncotarget, 9: 24737-47, 2018). In addition, because IL-2 plays a pleiotropic functions in immune homeostasis and activation of the immune system, it makes it a particular challenging in therapeutic setting when either immune suppression or immune activation but not both is considered desirable. For example, as an anti-cancer agent, IL-2 causes problem because it can predominantly expand immunosuppressive regulatory T cells, or T_{regs} when used at low concentration (see, for example, Arenas-Ramirez et al., Trends in Immunology. 36: 763-777, 2015). On the other hand, in the setting for autoinflammatory disease treatment, activation of CD8 and other effector cells in addition to regulatory T cells can have counteractive effects. Also, the effects of IL-2 therapy using usual routes of drug administration such as intravenous infusion (i.v.) or subcutaneous injection are predominantly systemic, rather than being localized to target tissues or target cells, resulting in side effects such as breathing problems, nausea, low blood pressure, loss of appetite, confusion, serious infections, seizures, allergic reactions, heart problems, renal failure, and vascular leak syndrome.

[0006] Chimeric antigen receptor T cells (CAR-T) against CD19 is clinically validated for effective treatment of hematological malignancies. However, CAR-T therapy for solid tumors has not yet been approved by regulatory authorities. Lack of persistence and lack of tumor infiltration of sufficient number of transduced CAR-T cells are among the major hurdles to overcome. Although high dose (HD) IL-2 has been used to support the CAR-T applications, shortcomings of IL-2 therapy can severely limit its potentials for effective clinical applications. In a recent preclinical model of Her2 CAR-T therapy, IL-2 was used to activate the CAR-T cells without signaling in the animal host, and eradicated human melanoma cells from patients resistant to adoptive T-cell transfer (ACT) of autologous tumor infiltrating lymphocytes (TILs) (Forsberg et al., Cancer Res., 79:899-904, 2019).

[0007] Nonetheless, IL-2 therapy can be effective, and there is an unmet need in the art to overcome these and other drawbacks.

[0008] Embodiments of the present disclosure address these problems and more by providing an activatable proprotein comprising IL-2 that can be activated within a disease tissue, for example, a cancer tissue or tumor.

### BRIEF SUMMARY

[0009] Embodiments of the present disclosure include an activatable proprotein homodimer, comprising a first polypeptide and a second polypeptide, wherein:

[0010] (a) the first polypeptide and the second polypeptide comprise, in an N- to C-terminal orientation, or a C- to N-terminal orientation, a binding moiety, a first linker, an IL-2 protein variant, a second linker, and an IL-2 binding protein; or

[0011] (b) the first polypeptide and the second polypeptide comprise, in an N- to C-terminal orientation, or a C- to N-terminal orientation, a binding moiety, a first linker, an IL-2 binding protein, a second linker, and an IL-2 protein variant,

[0012] wherein the binding moiety of the first polypeptide binds to the binding moiety of the second polypeptide, wherein the IL-2 protein variant binds to the IL-2 binding protein of the second polypeptide, and wherein the IL-2 binding protein of the first polypeptide binds to the IL-2 protein variant of the second polypeptide, wherein said binding masks a binding site of IL-2 protein variant(s) that otherwise binds to an IL-2Rβ/γc and/or IL-2Rα/β/γc chain present on the surface of an immune cell in vitro or in vivo, and wherein at least one of the first or the second linker is a cleavable linker; or

[0013] (c) the first and the second polypeptide comprise, in an N- to C-terminal orientation, or a C- to N-terminal orientation, an IL-2 protein variant, a first linker, an IL-2 binding protein, a second linker, and an optional affinity purification tag; or

[0014] (d) the first and the second polypeptide comprise, in an N- to C-terminal orientation, or a C- to N-terminal orientation, an IL-2 binding protein, a first linker, an IL-2 protein variant, a second linker, and an optional affinity purification tag,

[0015] wherein the IL-2 protein variant of the first polypeptide binds to the IL-2 binding protein of the second polypeptide, and wherein the IL-2 binding protein of the first polypeptide binds to the IL-2 protein variant of the second polypeptide, wherein said binding masks a binding site of IL-2 protein variant(s) that otherwise binds to an IL-2Rβ/γc and/or IL-2Rα/β/γc chain present on the surface of an immune cell in vitro or in vivo, and wherein the first linker is a cleavable linker,

[0016] wherein the IL-2 protein variant comprises one or more amino acid alterations relative to a wild-type IL-2 sequence, and has reduced binding affinity to wild-type IL-2Rα relative to that of the wild-type IL-2 sequence.

[0017] In some embodiments, the IL-2 protein variant has a reduced binding affinity to wild-type IL-2Rα of about or at least about 2-fold, 5-fold, 10-fold, 50-fold, 100-fold, 1000-fold or more, relative to the binding affinity of the wild-type IL-2 sequence. In some embodiments, the IL-2 protein variant comprises one or more amino acid substitutions of a positively charged amino acid to a negatively charged amino acid, and/or one or more amino acid substitutions of a negatively charged amino acid to a positively charged amino acid, optionally selected from one or more of K35D, K35E, R38D, R38E, K43D, K43E, E61K, E61R, E62K, and E62R. In some embodiments, the IL-2 protein variant comprises, consists, or consists essentially of an amino acid sequence that is at least 80, 85, 90, 95, 98, or 100% identical to an amino acid sequence selected from Table S1, optionally amino acids 21-153 of SEQ ID NO: 1 (full-length wild-type human IL-2), optionally comprising a C145X (X is any amino acid) or a C145S substitution as defined by SEQ ID NO: 1, and which has reduced binding affinity to wild-type IL-2Rα relative to that of the wild-type IL-2 sequence. In some embodiments, the IL-2 protein variant comprises, consists, or consists essentially of an amino acid sequence that is at least 80, 85, 90, 95, 98, or 100% identical to SEQ ID NO: 2 (mature human IL-2 with C125S substitution), optionally wherein the IL-2 protein retains the 5125 residue as defined by SEQ ID NO: 2, optionally wherein the IL-2 protein variant comprises or retains any one or more of K35D, K35E, R38D, R38E, K43D, K43E, E61K, E61R, E62K, and E62R substitutions as defined by SEQ ID NO: 2, and which has reduced binding affinity to wild-type IL-2Rα relative to that of the wild-type IL-2 sequence.

[0018] In some embodiments, the IL-2 protein variant comprises, consists, or consists essentially of an amino acid sequence that is at least 80, 85, 90, 95, 98, or 100% identical to SEQ ID NO: 3 (mature human IL-2 “D10” variant), optionally wherein the IL-2 protein retains any one or more of the Q74H, L80F, R81D, L85V, I86V, and/or I92F substitutions as defined by SEQ ID NO: 3, optionally wherein the IL-2 protein variant comprises or retains any one or more of K35D, K35E, R38D, R38E, K43D, K43E, E61K, E61R, E62K, and E62R substitutions as defined by SEQ ID NO: 3, and which has reduced binding affinity to wild-type IL-2Rα relative to that of the wild-type IL-2 sequence. In some embodiments, the IL-2 protein variant comprises one or more amino acid substitutions at residues selected from A1, P2, A3, S4, and S5, as defined by SEQ ID NO: 2 or 3, or comprises N-terminal deletion of 1, 2, 3, 4, or 5 amino acids, as defined by SEQ ID NO: 2 or 3.

[0019] In some embodiments, the IL-2 binding protein is an IL-2Rα protein variant that comprises one or more amino acid alterations relative to a wild-type IL-2Rα sequence, and has reduced binding affinity to wild-type IL-2 relative to that of the wild-type IL-2Rα sequence. In some embodiments, the IL-2Rα protein variant comprises one or more amino acid substitutions of a positively charged amino acid to a negatively charged amino acid, and/or one or more amino acid substitutions of a negatively charged amino acid to a positively charged amino acid, optionally selected from one or more of D4R, D4K, D6R, D6K, E29R, E29K, K38D, K38E, R36D, and R36E, as defined by SEQ ID NO: 6. In some embodiments, the IL-2Rα protein variant comprises, consists, or consists essentially of an amino acid sequence selected from Table S2, optionally amino acids 22-187 of SEQ ID NO: 4, or an active variant or fragment thereof that is at least 80, 85, 90, 95, 98, or 100% identical to a sequence selected from Table S2, and optionally comprises or retains one or more amino acid substitutions selected from D4R, D4K, D6R, D6K, E29R, E29K, K38D, K38E, R36D, and R36E, as defined by SEQ ID NO: 6. In some embodiments, the IL-2Rα protein variant comprises one or more substitutions selected from D4C, DSC, D6C, E29C, R36C, and K38C, which enhance the stability of the proprotein homodimer.

[0020] In some embodiments, the IL-2 protein variant/IL-2Rα protein variant comprise one or more corresponding amino acid substitution pairs selected from:

[0021] R38D/D6R, and K43E/E29A;

[0022] R38D/D6R, K43E/E29K, and F42A of IL-2;

[0023] E61K/K38E, and K43E/E29K, and F42A of IL-2;

[0024] K35D/D4R, K35D/D4K, K35E/D4R, and K35E/D4K;

[0025] R38D/D6R, R38D/D6K, R38E/D6R, and R38E/D6K;

[0026] K43D/E29R, K43D/E29K, K43E/E29R, and K43E/E29K;

[0027] E61K/K38D, E61K/K38E, E61R/K38D, and E61R/K38E; and

[0028] E62K/R36D, E62K/R36E, E62R/R36D, and E62R/R36E.

[0029] In some embodiments, the IL-2 protein variant and the IL-2Rα protein variant have a binding affinity for each other that is lower than the binding affinity between wild-type IL-2 and wild-type IL-2Rα. In some embodiments, the IL-2 protein variant and the IL-2Rα protein variant have a binding affinity for each other that is lower than the binding affinity between wild-type IL-2 and wild-type IL-2Rα by about or at least about 2-fold, 5-fold, 10-fold, 50-fold, 100-fold, 1000-fold or more.

[0030] In some embodiments, the binding moieties of (a) and/or (b) do not bind to the IL-2 protein variant or the IL-2 binding protein. In some embodiments, the binding moieties of (a) and/or (b) bind to the IL-2 protein variant. In some embodiments, the binding moieties of the first polypeptide and the second polypeptide of (a) and/or (b) bind together, optionally homodimerize, via at least one non-covalent interaction. In some embodiments, the binding moieties of the first polypeptide and the second polypeptide of (a) and/or (b) bind together, optionally homodimerize, via at least one covalent bond. In some embodiments, the at least one covalent bond comprises at least one disulfide bond. In some embodiments, the binding moieties of the first polypeptide and the second polypeptide of (a) and/or (b) are selected from Table M1. In some embodiments, the binding moieties of the first polypeptide and the second polypeptide of (a) or (b) comprise an antigen binding domain of an immunoglobulin, including antigen binding fragments and variants thereof. In some embodiments, the binding moieties of the first polypeptide and the second polypeptide of (a) and/or (b) comprise a CH1, CH2, CH3, CH1CH3, CH2CH3, CH1CH2CH3, and/or CL domain of an immunoglobulin, including fragments and variants thereof.

[0031] In some embodiments, the binding moieties of the first polypeptide and the second polypeptide of (a) and/or (b) comprise, in an N- to C-terminal orientation: (1) an antigen binding domain of an immunoglobulin, including antigen binding fragments and variants thereof; and (2) a CH1, CH2, CH3, CH1CH3, CH2CH3, CH1CH2CH3, and/or CL domain of an immunoglobulin, including fragments and variants thereof. In some embodiments, the antigen binding domain comprises a VH or VL domain of an immunoglobulin, including antigen binding fragments and variants thereof.

[0032] In some embodiments, the binding moieties of the first polypeptide and the second polypeptide of (a) and/or (b) do not bind to an antigen.

[0033] In some embodiments, the binding moieties of the first polypeptide and the second polypeptide of (a) and/or (b) comprise a CH2CH3 domain of an immunoglobulin. In some embodiments, the immunoglobulin is from an immunoglobulin class selected from IgG1, IgG2, IgG3, IgG4, IgA, IgD, IgE, and IgM.

[0034] In some embodiments, the binding moieties of the first polypeptide and the second polypeptide of (a) and/or (b) comprise a leucine zipper peptide.

[0035] In some embodiments, the affinity purification tag of (c) and/or (d) is selected from a polyhistidine tag (optionally hexahistidine tag), a VSV-G tag, a universal tag, a Strep-tag, an S-tag, an S1-tag, a Phe-tag, a Cys-tag, an Asp-tag, an Arg-tag, a Myc epitope tag, a KT3 epitope tag, an HSV epitope tag, a histidine affinity tag, a hemagglutinin (HA) tag, a FLAG epitope tag, an E2 epitope tag, a V5-tag, a T7-tag, an AU5 epitope tag, and an AU1 epitope tag.

[0036] In some embodiments, the cleavable linker comprises a protease cleavage site, optionally wherein the cleavable linker is selected from Table S3. In some embodiments, the protease cleavage site is cleavable by a protease selected from one or more of a metalloprotease, a serine protease, a cysteine protease, and an aspartic acid protease. In some embodiments, the protease cleavage site is cleavable by a protease selected from one or more of MMP1, MMP2, MMP3, MMP4, MMP5, MMP6, MMP7, MMP8, MMP9, MMP10, MMP11, MMP12, MMP13, MMP14, TEV protease, matriptase, uPA, FAP, Legumain, PSA, Kallikrein, Cathepsin A, and Cathepsin B. In some embodiments, the first linker and/or the second linker are about 1-50 1-40, 1-30, 1-20, 1-10, 1-5, 1-4, 1-3 amino acids in length, or about 1, 2, 3, 4, 5, 6, 7, 8, 9, 10, 11, 12, 13, 14, 15, 16, 17, 18, 19, 20, 21, 22, 23, 24, 25, 26, 27, 28, 29, 30, 31, 32, 33, 34, 35, 36, 37, 38, 39, 40, 41, 42, 43, 44, 45, 46, 47, 48, 49, 50 amino acids in length. In some embodiments, the first linker of (a) and/or (b) is a cleavable linker, and wherein the second linker of (a) and/or (b) is a non-cleavable linker. In some embodiments, the cleavage, optionally protease cleavage, of the first linker of (a) and/or (b) exposes the binding site(s) of the first and/or second IL-2 protein variants that bind to the IL-2Rβ/γc chain present on the surface of the immune cell in vitro or in vivo.

[0037] In some embodiments, the first linker of (a) and/or (b) is a non-cleavable linker, and wherein the second linker of (a) and/or (b) is a cleavable linker. In some embodiments, the cleavage, optionally protease cleavage, of the second linker of (a) and/or (b) exposes the binding site(s) of the first and/or second IL-2 protein variants that bind to the IL-2Rβ/γc chain present on the surface of the immune cell in vitro or in vivo. In some embodiments, the cleavage, optionally protease cleavage, of the first linker of (c) and/or (d) exposes the binding site(s) of the first and/or second IL-2 protein variants that bind to the IL-2Rβ/γc chain present on the surface of the immune cell in vitro or in vivo.

[0038] In some embodiments, the immune cell is selected from one or more of a T cell, a B cell, a natural killer cell, a monocyte, and a macrophage.

[0039] In some embodiments, the first polypeptide and the second polypeptide of (a) comprise, in an N- to C-terminal orientation, the binding moiety, the first linker, the IL-2 protein variant, the second linker, and the IL-2 binding protein. In some embodiments, the first polypeptide and the second polypeptide of (a) comprise, in an N- to C-terminal orientation, the IL-2 binding protein, the first linker, the IL-2 protein variant, the second linker, and the binding moiety. In some embodiments, the first polypeptide and the second polypeptide of (b) comprise, in an N- to C-terminal orientation, the binding moiety, the first linker, the IL-2 binding protein, the second linker, and the IL-2 protein variant. In some embodiments, the first polypeptide and the second polypeptide of (b) comprise, in an N- to C-terminal orientation, the IL-2 protein, the first linker, the IL-2 binding protein variant, the second linker, and the binding moiety. In some embodiments, the first polypeptide and the second polypeptide of (c) comprise, in an N- to C-terminal orientation, the IL-2 protein variant, the first linker, the IL-2 binding protein, the second linker, and the affinity purification tag. In some embodiments, the first polypeptide and the second polypeptide of (d) comprise, in an N- to C-terminal orientation, the IL-2 binding protein, the first linker, the IL-2 protein variant, the second linker, and the affinity purification tag.

[0040] In some embodiments, the first polypeptide and the second polypeptide comprise, consist, or consist essentially of an amino acid sequence that is at least 80, 85, 90, 95, 98, or 100% identical to a sequence selected from Tables S4-S6. In some embodiments, the activatable proprotein homodimer is substantially in homodimeric form in a physiological solution, or under physiological conditions, optionally in vivo conditions.

[0041] Also included is a recombinant nucleic acid molecule encoding the activatable proprotein homodimer described herein, including a vector comprising the recombinant nucleic acid molecule, and a host cell comprising the recombinant nucleic acid molecule or the vector.

[0042] Also included is a method of producing an activatable proprotein, comprising culturing the host cell under culture conditions suitable for the expression of the activatable proprotein homodimer, and isolating the activatable proprotein from the culture.

[0043] Certain embodiments include a pharmaceutical composition, comprising an activatable proprotein homodimer described herein, and a pharmaceutically acceptable carrier.

[0044] Also included is a method of treating disease in a subject, and/or a method of enhancing an immune response in a subject, comprising administering to the subject a therapeutically effective amount of a pharmaceutical composition described herein. In some embodiments, the disease is selected from one or more of a cancer, a viral infection, and an immune disorder. In some embodiments, the cancer is a primary cancer or a metastatic cancer, and is selected from one or more of melanoma (optionally metastatic melanoma), kidney cancer (optionally renal cell carcinoma), pancreatic cancer, bone cancer, prostate cancer, small cell lung cancer, non-small cell lung cancer (NSCLC), mesothelioma, leukemia (optionally lymphocytic leukemia, chronic myelogenous leukemia, acute myeloid leukemia, or relapsed acute myeloid leukemia), multiple myeloma, lymphoma, hepatoma (hepatocellular carcinoma), sarcoma, B-cell malignancy, breast cancer, ovarian cancer, colorectal cancer, glioma, glioblastoma multiforme, meningioma, pituitary adenoma, vestibular schwannoma, primary CNS lymphoma, primitive neuroectodermal tumor (medulloblastoma), bladder cancer, uterine cancer, esophageal cancer, brain cancer, head and neck cancers, cervical cancer, testicular cancer, thyroid cancer, and stomach cancer.

[0045] In some embodiments, following administration, the activatable proprotein homodimer is activated through protease cleavage in a cell or tissue, optionally a cancer cell or cancer tissue, which exposes the binding site(s) of the first and/or second IL-2 proteins that bind to the IL-2R13/yc chain present on the surface of the immune cell in vitro or in vivo, and thereby generates an activated protein. In some embodiments, the activated protein binds via the IL-2 protein to the IL-2Rβ/γc chain present on the surface of an immune cell in vitro or in vivo. In some embodiments, the immune cell is selected from one or more of a T cell, a B cell, a natural killer cell, a monocyte, and a macrophage. In some embodiments, binding between the IL-2 protein(s) and the IL-2 binding protein(s) (optionally disulfide binding between the IL-2 protein(s) and the IL-2Rα protein(s)) in the activated protein masks the binding site of the IL-2 protein(s) that binds to the IL-2Rα/β/γc chain expressed on T_{regs}, and thereby interferes with binding of the activated protein to T_{regs}.

[0046] In some embodiments, administration and activation of the activatable proprotein increases an immune response in the subject by about or at least about 5, 10, 15, 20, 25, 30, 35, 40, 45, 50, 60, 70, 80, 90, 100, 200, 300, 400, 500, 600, 700, 800, 900, 1000, 2000% or more, relative to a control, optionally wherein the immune response is an anti-cancer or anti-viral immune response. In some embodiments, administration and activation of the activatable proprotein increases cell-killing in the subject by about or at least about 5, 10, 15, 20, 25, 30, 35, 40, 45, 50, 60, 70, 80, 90, 100, 200, 300, 400, 500, 600, 700, 800, 900, 1000, 2000% or more, relative to a control, optionally wherein the cell-killing is cancer cell-killing or virally-infected cell-killing.

[0047] In some embodiments, the viral infection is selected from one or more of human immunodeficiency virus (HIV), Hepatitis A, Hepatitis B, Hepatitis C, Hepatitis E, Caliciviruses associated diarrhoea, Rotavirus diarrhoea, Haemophilus influenzae B pneumonia and invasive disease, influenza, measles, mumps, rubella, Parainfluenza associated pneumonia, Respiratory syncytial virus (RSV) pneumonia, Severe Acute Respiratory Syndrome (SARS), Human papillomavirus, Herpes simplex type 2 genital ulcers, Dengue Fever, Japanese encephalitis, Tick-borne encephalitis, West-Nile virus associated disease, Yellow Fever, Epstein-Barr virus, Lassa fever, Crimean-Congo haemorrhagic fever, Ebola haemorrhagic fever, Marburg haemorrhagic fever, Rabies, Rift Valley fever, Smallpox, upper and lower respiratory infections, and poliomyelitis, optionally wherein the subject is HIV-positive. In some embodiments, the immune disorder is selected from one or more of type 1 diabetes, vasculitis, and an immunodeficiency.

[0048] In some embodiments, the pharmaceutical composition is administered to the subject by parenteral administration. In some embodiments, the parenteral administration is intravenous administration.

[0049] In some embodiments, the disease is a cancer, and the method comprises administering a chimeric antigen receptor (CAR)-modified immune cell to the subject, optionally a CAR-modified T-cell, natural killer (NK) cell, or induced pluripotent stem cell-derived lymphocyte, wherein the CAR-modified immune cell is modified to express an exogenous IL-2Rα protein variant that binds to the IL-2 protein variant as defined herein. In some embodiments, the IL-2 protein variant has a reduced binding affinity to wild-type IL-2Rα present on endogenous cells in the subject of about or at least about 2-fold, 5-fold, 10-fold, 50-fold, 100-fold, 1000-fold or more, relative to the binding affinity of the wild-type IL-2 sequence.

[0050] In some embodiments, the disease is a cancer, and wherein the method comprises administering an adoptive cell therapy (ACT), wherein the adoptively transferred cells are modified to express an exogenous IL-2Rα protein variant that binds to the IL-2 protein variant as defined herein.

[0051] Also included is the use of a pharmaceutical composition described herein in the preparation of a medicament for treating a disease in a subject, and/or for enhancing an immune response in a subject. Also included is a pharmaceutical composition described herein for use in treating a disease in a subject, and/or for enhancing an immune response in a subject.

### BRIEF DESCRIPTION OF THE DRAWINGS

[0052] FIG. 1 shows the protein topology of human interleukin 2 (IL-2) and human interleukin 2 receptor alpha chain (IL-2Rα).

[0053] FIG. 2 shows block diagrams of exemplary proprotein homodimer pairs, each comprising an optional affinity tag (His6).

[0054] FIG. 3 shows block diagrams of exemplary proprotein homodimer pairs, each comprising CH2CH3 domains as binding moieties.

[0055] FIGS. 4A-4B show schematic diagrams of the activation of exemplary proprotein homodimers through protease cleavage of a linker. 4A shows exemplary activation of fusion protein by protease cleavage of the linker sequences between IL-2 or IL-2 variant and IL-2Rα or IL-2Rα variant. 4B shows exemplary activation of fusion protein by protease cleavage of both the linker sequences between IL-2 or IL-2 variant and IL-2Rα or IL-2Rα variant, and also between Fc and IL-2 or IL-2 variant.

[0056] FIGS. 5A-5D illustrate certain salt bridge mutations in IL-2 (5A, 5C) and IL-2Rα (5B, 5D) that can be used in the covariant IL-2/IL-2Rα homodimers described herein. 5A shows a side view of the IL-2 structure interacting with IL-2Rα, highlighting the salt bridge forming side chains of K35, R38, K43, E61 and E62. 5B shows a side view of the IL-2Rα structure interacting with IL-2, highlighting the salt bridge forming side chains of D4, D6, E29, R36 and K38. The box below each Figure indicates salt bridge side chain pairs between IL-2 (5A) and IL-2Rα (5B). 5C shows a side view of the interface of the IL-2 structure interacting with IL-2Rα, highlighting exemplary amino acid substitutions of K35E, R38E, K43E, E61K and E62K. 5D shows a side view of the IL-2Rα structure interacting with IL-2, highlighting exemplary amino acid substitutions of D4K, D6K, E29K, R36E and K38E. The box below indicates new salt bridge side chain pairs between the variant of IL-2 (5C) and variant of IL-2Rα (5D).

[0057] FIGS. 6A-6B show certain exemplary homodimer structures. 6A shows a schematic depiction of homodimeric IL-2 or IL-2 variant and IL-2Rα or IL-2Rα variant fusion protein structure. The variants of IL-2 and IL-2Rα require certain level of binding affinity in order to form dimeric fusion structure and thus to effectively shield site on the IL-2 or the IL-2 variant from binding to IL-2Rβγ binding. The left side of 6A shows that IL-2 binds to wt-IL-2Rα and effectively forms a dimeric structure, where the protease-activated product preferentially stimulates high affinity IL-2 receptor cells (Treg, NK-CD56^{bright}) over cytotoxic NK, naïve, memory, and cytotoxic T cells expressing the intermediate affinity IL-2 receptor (IL-2Rβγ). The right side of 6A shows IL-2′, an IL-2 variant that binds to wild-type IL-2Rα with reduced affinity (although the affinity is reduced, there is still sufficient level of formation of the dimeric structure due to avidity binding of two moieties of IL-2′ and two of IL-2Rα), where the protease-activated product selectively activates cytotoxic NK cells and CD8 T cells expressing the intermediate affinity IL-2 receptor (IL-2Rβγ). Because IL-2Rα is often present at high levels than IL-2Rβ or γ subunits on immune regulatory cells such as Tregs, the reduced-affinity IL-2′ variant can signal as effectively as wild-type IL-2 on these cells. 6B shows a schematic depiction of homodimeric IL-2 and IL-2Rα homodimer structure as a fusion to the C-terminus of an Fc region.

[0058] FIGS. 7A-7B show certain exemplary homodimer structures. 7A illustrates covariants of IL-2″ (an IL-2 variant) and IL-2Rα″ (an IL-2Rα variant) that have significantly reduced binding affinity towards their respective cognate wild-type receptor alpha chains and ligands, but which retain sufficient affinity for each other to allow binding and formation of a dimeric structure between IL-2″ and IL-2Rα″. Here, IL-2″ is capable of binding to IL-2Rα″ but not to wild-type IL-2Rα; in contrast to FIG. 6, the protease activated product in 7A can void the preferential stimulation of high affinity IL-2 receptor expressing cells (Treg, NK-CD56^{bright}) and in efficiently activate cytotoxic NK, naïve T cells, memory T cells and cytotoxic T cells expressing intermediate affinity IL-2 receptor of IL-2Rβγ. 7B shows a schematic depiction of exemplary homodimeric IL-2″ and IL-2Rα homodimer structure as a fusion to the C-terminus of an Fc.

[0059] FIGS. 8A-8B illustrate how a homodimer comprising an IL-2 variant can selectively stimulate adoptively-transferred cell therapies for the treatment of human autoimmune, cancer, or infectious diseases. In 8A, an IL-2 variant (IL-2″) can be administered into a human subject where it does not preferentially activate wild-type IL-2Rα expressing cells, such as Tregs or activated effector T cells. In 8B, the IL-2″ can selectively stimulate adoptively transferred cells engineered with exogenous expression of membrane associated form of IL-2Rα″ (to which IL-2″ is able to bind), and thereby enhance the binding and signaling through IL-2Rα″βγ with high potency Immune activating effector cells such as CD4 T cells, CD8 T cells, NK cells, and induced pluripotent stem cell (iPSC)-derived lymphocytic cells can be engineered to exogenously express the membrane IL-2R″ chain and those cells can be preferentially activated using the IL-2″ variant; this strategy can also be applied to adoptively transferred cell therapies for immune suppression, such as Treg cell therapy, where Tregs can be engineered to exogenously express a membrane bound form of the IL-2Rα″ chain and those cell can be preferentially activated using the IL-2″ variant. Although wild-type IL-2 is usually used to stimulate Tregs in vivo for autoimmune disease treatment, IL-2 can also stimulate activated CD4 and CD8 effector T cells, where IL-2Rα chain expression is induced to attenuate the efficacy of Treg cell therapy Immune activating effector cells such as CD4 T cells, CD8 T cells, NK, and induced pluripotent stem cell (iPSC)-derived lymphocytic cells can be further engineered to express specific target cell recognition molecules, such as chimeric antigen receptors (CARs) or exogenous T cell receptors (TCRs).

[0060] FIGS. 9A-9E show ELISA binding of variants of IL-2 and IL-2Rα (see Table S4). Wild-type IL-2 and IL-2 variants were expressed as fusion proteins to the C-terminus of a human Fc. Wild-type IL-2Rα and variants with N-terminal His6-avi tag were biotinylated and captured on streptavidin pre-immobilized ELISA plate. 9A shows IL-2_E61K binding to biotinylated IL-2Rα_K38E and IL-2Rα_R36E_K38E; 9B shows wild-type IL-2 and IL-2_E61K binding to biotinylated wild-type IL-2Rα; 9C shows wild-type IL-2 and IL-2_E61K and IL-2_F42A_E61K binding to biotinylated IL-2Rα_K38E; 9D shows IL-2_R38E and IL-2_F42A_R38E binding to biotinylated IL-2Rα_D6K; and 9E shows IL-2_F42A_E61K binding to biotinylated IL-2Rα_K38E.

[0061] FIGS. 10A-10B show SDS-PAGE results of purified proteins. 10A shows non-reducing SDS-PAGE results, and 10B shows reducing SDS-PAGE results. M: molecular weight marker.

[0062] FIGS. 11A-11C show representative HPLC analysis results of purified proteins.

[0063] FIG. 12 shows reducing SDS-PAGE images of the intact and protease digested fragments of the P22261450, P22271450, and P22291450 proteins. M: molecular weight marker. Lane 1, intact protein; lane 2, MMP-2 digested protein fragments; lane 3, uPA digested protein fragments; and lane 4, MMP-2 and uPA co-digested protein fragments.

[0064] FIGS. 13A-13C show dose responsive curves of intact proprotein and protease digested proteins in a M-07e proliferation assay, as measured by a colorimetric assay (Cell Counting Kit-8 (CCK-8)). 13A shows the results for 22261450, 13B shows the results for 22271450, and 13C shows the results for 222901450.

### DETAILED DESCRIPTION

[0065] Unless defined otherwise, all technical and scientific terms used herein have the same meaning as commonly understood by those of ordinary skill in the art to which the disclosure belongs. Although any methods, materials, compositions, reagents, cells, similar or equivalent similar or equivalent to those described herein can be used in the practice or testing of the subject matter of the present disclosure, preferred methods and materials are described. All publications and references, including but not limited to patents and patent applications, cited in this specification are herein incorporated by reference in their entirety as if each individual publication or reference were specifically and individually indicated to be incorporated by reference herein as being fully set forth. Any patent application to which this application claims priority is also incorporated by reference herein in its entirety in the manner described above for publications and references.

[0066] Standard techniques may be used for recombinant DNA, oligonucleotide synthesis, and tissue culture and transformation (e.g., electroporation, lipofection). Enzymatic reactions and purification techniques may be performed according to manufacturer's specifications or as commonly accomplished in the art or as described herein. These and related techniques and procedures may be generally performed according to conventional methods well known in the art and as described in various general and more specific references that are cited and discussed throughout the present specification. Unless specific definitions are provided, the nomenclature utilized in connection with, and the laboratory procedures and techniques of, molecular biology, analytical chemistry, synthetic organic chemistry, and medicinal and pharmaceutical chemistry described herein are those well-known and commonly used in the art. Standard techniques may be used for recombinant technology, molecular biological, microbiological, chemical syntheses, chemical analyses, pharmaceutical preparation, formulation, and delivery, and treatment of patients.

[0067] For the purposes of the present disclosure, the following terms are defined below.

[0068] The articles “a” and “an” are used herein to refer to one or to more than one (i.e., to at least one) of the grammatical object of the article. By way of example, “an element” includes “one element”, “one or more elements” and/or “at least one element”.

[0069] By “about” is meant a quantity, level, value, number, frequency, percentage, dimension, size, amount, weight or length that varies by as much as 30, 25, 20, 15, 10, 9, 8, 7, 6, 5, 4, 3, 2 or 1% to a reference quantity, level, value, number, frequency, percentage, dimension, size, amount, weight or length.

[0070] The terms “activatable proprotein,” “activatable prodrug”, “prodrug” or “proprotein” are used interchangeably herein and refer to an activatable proprotein comprising at least a masking moiety and an active domain, or derivatives/variants therefrom, as described herein. In one embodiment, the proprotein may also comprise one or more protein domains.

[0071] The term “antigen” refers to a molecule or a portion of a molecule capable of being bound by a selective binding agent, such as an antibody, and additionally capable of being used in an animal to produce antibodies capable of binding to an epitope of that antigen. An antigen may have one or more epitopes. As used herein, the term “antigen” includes substances that are capable, under appropriate conditions, of inducing an immune response to the substance and of reacting with the products of the immune response. More broadly, the term “antigen” includes any substance to which an antibody binds, or for which antibodies are desired, regardless of whether the substance is immunogenic. For such antigens, antibodies can be identified by recombinant methods, independently of any immune response.

[0072] An “antagonist” refers to biological structure or chemical agent that interferes with or otherwise reduces the physiological action of another agent or molecule. In some instances, the antagonist specifically binds to the other agent or molecule. Included are full and partial antagonists.

[0073] An “agonist” refers to biological structure or chemical agent that increases or enhances the physiological action of another agent or molecule. In some instances, the agonist specifically binds to the other agent or molecule. Included are full and partial agonists.

[0074] As used herein, the term “amino acid” is intended to mean both naturally occurring and non-naturally occurring amino acids as well as amino acid analogs and mimetics. Naturally-occurring amino acids include the 20 (L)-amino acids utilized during protein biosynthesis as well as others such as 4-hydroxyproline, hydroxylysine, desmosine, isodesmosine, homocysteine, citrulline and ornithine, for example. Non-naturally occurring amino acids include, for example, (D)-amino acids, norleucine, norvaline, p-fluorophenylalanine, ethionine and the like, which are known to a person skilled in the art. Amino acid analogs include modified forms of naturally and non-naturally occurring amino acids. Such modifications can include, for example, substitution or replacement of chemical groups and moieties on the amino acid or by derivatization of the amino acid. Amino acid mimetics include, for example, organic structures which exhibit functionally similar properties such as charge and charge spacing characteristic of the reference amino acid. For example, an organic structure which mimics arginine (Arg or R) would have a positive charge moiety located in similar molecular space and having the same degree of mobility as the e-amino group of the side chain of the naturally occurring Arg amino acid. Mimetics also include constrained structures so as to maintain optimal spacing and charge interactions of the amino acid or of the amino acid functional groups. Those skilled in the art know or can determine what structures constitute functionally equivalent amino acid analogs and amino acid mimetics.

[0075] As used herein, a subject “at risk” of developing a disease, or adverse reaction may or may not have detectable disease, or symptoms of disease, and may or may not have displayed detectable disease or symptoms of disease prior to the treatment methods described herein. “At risk” denotes that a subject has one or more risk factors, which are measurable parameters that correlate with development of a disease, as described herein and known in the art. A subject having one or more of these risk factors has a higher probability of developing disease, or an adverse reaction than a subject without one or more of these risk factor(s).

[0076] “Biocompatible” refers to materials or compounds which are generally not injurious to biological functions of a cell or subject and which will not result in any degree of unacceptable toxicity, including allergenic and disease states.

[0077] The term “binding” refers to a direct association between two molecules, due to, for example, covalent, electrostatic, hydrophobic, and ionic and/or hydrogen-bond interactions, including interactions such as salt bridges and water bridges.

[0078] By “coding sequence” is meant any nucleic acid sequence that contributes to the code for the polypeptide product of a gene. By contrast, the term “non-coding sequence” refers to any nucleic acid sequence that does not directly contribute to the code for the polypeptide product of a gene.

[0079] Throughout this disclosure, unless the context requires otherwise, the words “comprise,” “comprises,” and “comprising” will be understood to imply the inclusion of a stated step or element or group of steps or elements but not the exclusion of any other step or element or group of steps or elements.

[0080] By “consisting of” is meant including, and limited to, whatever follows the phrase “consisting of” Thus, the phrase “consisting of” indicates that the listed elements are required or mandatory, and that no other elements may be present. By “consisting essentially of” is meant including any elements listed after the phrase, and limited to other elements that do not interfere with or contribute to the activity or action specified in the disclosure for the listed elements. Thus, the phrase “consisting essentially of” indicates that the listed elements are required or mandatory, but that other elements are optional and may or may not be present depending upon whether or not they materially affect the activity or action of the listed elements.

[0081] The term “endotoxin free” or “substantially endotoxin free” relates generally to compositions, solvents, and/or vessels that contain at most trace amounts (e.g., amounts having no clinically adverse physiological effects to a subject) of endotoxin, and preferably undetectable amounts of endotoxin. Endotoxins are toxins associated with certain micro-organisms, such as bacteria, typically gram-negative bacteria, although endotoxins may be found in gram-positive bacteria, such as Listeria monocytogenes. The most prevalent endotoxins are lipopolysaccharides (LPS) or lipo-oligo-saccharides (LOS) found in the outer membrane of various Gram-negative bacteria, and which represent a central pathogenic feature in the ability of these bacteria to cause disease. Small amounts of endotoxin in humans may produce fever, a lowering of the blood pressure, and activation of inflammation and coagulation, among other adverse physiological effects.

[0082] Therefore, in pharmaceutical production, it is often desirable to remove most or all traces of endotoxin from drug products and/or drug containers, because even small amounts may cause adverse effects in humans. A depyrogenation oven may be used for this purpose, as temperatures in excess of 300° C. are typically required to break down most endotoxins. For instance, based on primary packaging material such as syringes or vials, the combination of a glass temperature of 250° C. and a holding time of 30 minutes is often sufficient to achieve a 3 log reduction in endotoxin levels. Other methods of removing endotoxins are contemplated, including, for example, chromatography and filtration methods, as described herein and known in the art.

[0083] Endotoxins can be detected using routine techniques known in the art. For example, the Limulus Amoebocyte Lysate assay, which utilizes blood from the horseshoe crab, is a very sensitive assay for detecting presence of endotoxin. In this test, very low levels of LPS can cause detectable coagulation of the limulus lysate due a powerful enzymatic cascade that amplifies this reaction. Endotoxins can also be quantitated by enzyme-linked immunosorbent assay (ELISA). To be substantially endotoxin free, endotoxin levels may be less than about 0.001, 0.005, 0.01, 0.02, 0.03, 0.04, 0.05, 0.06, 0.08, 0.09, 0.1, 0.5, 1.0, 1.5, 2, 2.5, 3, 4, 5, 6, 7, 8, 9, or 10 EU/mg of active compound. Typically, 1 ng lipopolysaccharide (LPS) corresponds to about 1-10 EU.

[0084] The term “half maximal effective concentration” or “EC₅₀” refers to the concentration of an agent (e.g., activatable proprotein) as described herein at which it induces a response halfway between the baseline and maximum after some specified exposure time; the EC₅₀ of a graded dose response curve therefore represents the concentration of a compound at which 50% of its maximal effect is observed. EC50 also represents the plasma concentration required for obtaining 50% of a maximum effect in vivo. Similarly, the “EC₉₀” refers to the concentration of an agent or composition at which 90% of its maximal effect is observed. The “EC₉₀” can be calculated from the “EC50” and the Hill slope, or it can be determined from the data directly, using routine knowledge in the art. In some embodiments, the EC₅₀ of an agent (e.g., activatable proprotein) is less than about 0.01, 0.05, 0.1, 0.2, 0.3, 0.4, 0.5, 0.6, 0.7, 0.8, 0.9, 1, 2, 3, 4, 5, 6, 7, 8, 9, 10, 11, 12, 13, 14, 15, 16, 17, 18, 19, 20, 25, 30, 40, 50, 60, 70, 80, 90, 100, 200 or 500 nM. In some embodiments, an agent will have an EC₅0 value of about 1 nM or less.

[0085] “Immune response” means any immunological response originating from immune system, including responses from the cellular and humeral, innate and adaptive immune systems. Exemplary cellular immune cells include for example, lymphocytes, macrophages, T cells, B cells, NK cells, neutrophils, eosinophils, dendritic cells, mast cells, monocytes, and all subsets thereof. Cellular responses include for example, effector function, cytokine release, phagocytosis, efferocytosis, translocation, trafficking, proliferation, differentiation, activation, repression, cell-cell interactions, apoptosis, etc. Humeral responses include for example IgG, IgM, IgA, IgE, responses and their corresponding effector functions.

[0086] The “half-life” of an agent such as an activatable proprotein can refer to the time it takes for the agent to lose half of its pharmacologic, physiologic, or other activity, relative to such activity at the time of administration into the serum or tissue of an organism, or relative to any other defined time-point. “Half-life” can also refer to the time it takes for the amount or concentration of an agent to be reduced by half of a starting amount administered into the serum or tissue of an organism, relative to such amount or concentration at the time of administration into the serum or tissue of an organism, or relative to any other defined time-point. The half-life can be measured in serum and/or any one or more selected tissues.

[0087] The terms “modulating” and “altering” include “increasing,” “enhancing” or “stimulating,” as well as “decreasing” or “reducing,” typically in a statistically significant or a physiologically significant amount or degree relative to a control. An “increased,” “stimulated” or “enhanced” amount is typically a “statistically significant” amount, and may include an increase that is 1.1, 1.2, 1.5, 2, 3, 4, 5, 6, 7, 8, 9, 10, 15, 20, 30, 40, 50, 60, 70, 80, 90, 100 or more times (e.g., 500, 1000 times) (including all integers and ranges in between e.g., 1.5, 1.6, 1.7. 1.8, etc.) the amount produced by no composition (e.g., the absence of agent) or a control composition. A “decreased” or “reduced” amount is typically a “statistically significant” amount, and may include a 1%, 2%, 3%, 4%, 5%, 6%, 7%, 8%, 9%, 10%, 11%, 12%, 13%, 14%, 15%, 16%, 17%, 18%, 19%, 20%, 25%, 30%, 35%, 40%, 45%, 50%, 55%, 60%, 65%, 70%, 75%, 80%, 85%, 90%, 95%, or 100% decrease (including all integers and ranges in between) in the amount produced by no composition (e.g., the absence of an agent) or a control composition. Examples of comparisons and “statistically significant” amounts are described herein.

[0088] The terms “polypeptide,” “protein” and “peptide” are used interchangeably and mean a polymer of amino acids not limited to any particular length. The term “enzyme” includes polypeptide or protein catalysts. The terms include modifications such as myristoylation, sulfation, glycosylation, phosphorylation and addition or deletion of signal sequences. The terms “polypeptide” or “protein” means one or more chains of amino acids, wherein each chain comprises amino acids covalently linked by peptide bonds, and wherein said polypeptide or protein can comprise a plurality of chains non-covalently and/or covalently linked together by peptide bonds, having the sequence of native proteins, that is, proteins produced by naturally-occurring and specifically non-recombinant cells, or genetically-engineered or recombinant cells, and comprise molecules having the amino acid sequence of the native protein, or molecules having deletions from, additions to, and/or substitutions of one or more amino acids of the native sequence. In certain embodiments, the polypeptide is a “recombinant” polypeptide, produced by recombinant cell that comprises one or more recombinant DNA molecules, which are typically made of heterologous polynucleotide sequences or combinations of polynucleotide sequences that would not otherwise be found in the cell.

[0089] The term “polynucleotide” and “nucleic acid” includes mRNA, RNA, cRNA, cDNA, and DNA. The term typically refers to polymeric form of nucleotides of at least 10 bases in length, either ribonucleotides or deoxynucleotides or a modified form of either type of nucleotide. The term includes single and double stranded forms of DNA. The terms “isolated DNA” and “isolated polynucleotide” and “isolated nucleic acid” refer to a molecule that has been isolated free of total genomic DNA of a particular species. Therefore, an isolated DNA segment encoding a polypeptide refers to a DNA segment that contains one or more coding sequences yet is substantially isolated away from, or purified free from, total genomic DNA of the species from which the DNA segment is obtained. Also included are non-coding polynucleotides (e.g., primers, probes, oligonucleotides), which do not encode a polypeptide. Also included are recombinant vectors, including, for example, expression vectors, viral vectors, plasmids, cosmids, phagemids, phage, viruses, and the like.

[0090] Additional coding or non-coding sequences may, but need not, be present within a polynucleotide described herein, and a polynucleotide may, but need not, be linked to other molecules and/or support materials. Hence, a polynucleotide or expressible polynucleotides, regardless of the length of the coding sequence itself, may be combined with other sequences, for example, expression control sequences.

[0091] The term “isolated” polypeptide or protein referred to herein means that a subject protein (1) is free of at least some other proteins with which it would typically be found in nature, (2) is essentially free of other proteins from the same source, e.g., from the same species, (3) is expressed by a cell from a different species, (4) has been separated from at least about 50 percent of polynucleotides, lipids, carbohydrates, or other materials with which it is associated in nature, (5) is not associated (by covalent or non-covalent interaction) with portions of a protein with which the “isolated protein” is associated in nature, (6) is operably associated (by covalent or non-covalent interaction) with a polypeptide with which it is not associated in nature, or (7) does not occur in nature. Such an isolated protein can be encoded by genomic DNA, cDNA, mRNA or other RNA, of may be of synthetic origin, or any combination thereof. In certain embodiments, the isolated protein is substantially free from proteins or polypeptides or other contaminants that are found in its natural environment that would interfere with its use (therapeutic, diagnostic, prophylactic, research or otherwise).

[0092] In certain embodiments, the “purity” of any given agent (e.g., activatable proprotein) in a composition may be defined. For instance, certain compositions may comprise an agent such as a polypeptide agent that is at least 80%, 85%, 90%, 91%, 92%, 93%, 94%, 95%, 96%, 97%, 98%, 99%, or 100% pure on a protein basis or a weight-weight basis, including all decimals and ranges in between, as measured, for example and by no means limiting, by high performance liquid chromatography (HPLC), a well-known form of column chromatography used frequently in biochemistry and analytical chemistry to separate, identify, and quantify compounds.

[0093] The term “reference sequence” refers generally to a nucleic acid coding sequence, or amino acid sequence, to which another sequence is being compared. All polypeptide and polynucleotide sequences described herein are included as references sequences, including those described by name and those described in the Tables and the Sequence Listing.

[0094] Certain embodiments include biologically active “variants” and “fragments” of the proteins/polypeptides described herein, and the polynucleotides that encode the same. “Variants” contain one or more substitutions, additions, deletions, and/or insertions relative to a reference polypeptide or polynucleotide (see, e.g., the Tables and the Sequence Listing). A variant polypeptide or polynucleotide comprises an amino acid or nucleotide sequence with at least about 50%, 55%, 60%, 65%, 70%, 75%, 80%, 85%, 90%, 91%, 92%, 93%, 94%, 95%, 96%, 97%, 98%, 99% or more sequence identity or similarity or homology to a reference sequence, as described herein, and substantially retains the activity of that reference sequence. Also included are sequences that consist of or differ from a reference sequences by the addition, deletion, insertion, or substitution of 1, 2, 3, 4, 5, 6, 7, 8, 9, 10, 11, 12, 13, 14, 15, 16, 17, 18, 19, 20, 30, 40, 50, 60, 70, 80, 90, 100, 110, 120, 130, 140, 150 or more amino acids or nucleotides and which substantially retain at least one activity of that reference sequence. In certain embodiments, the additions or deletions include C-terminal and/or N-terminal additions and/or deletions.

[0095] The terms “sequence identity” or, for example, comprising a “sequence 50% identical to,” as used herein, refer to the extent that sequences are identical on a nucleotide-by-nucleotide basis or an amino acid-by-amino acid basis over a window of comparison. Thus, a “percentage of sequence identity” may be calculated by comparing two optimally aligned sequences over the window of comparison, determining the number of positions at which the identical nucleic acid base (e.g., A, T, C, G, I) or the identical amino acid residue (e.g., Ala, Pro, Ser, Thr, Gly, Val, Leu, Ile, Phe, Tyr, Trp, Lys, Arg, His, Asp, Glu, Asn, Gln, Cys and Met) occurs in both sequences to yield the number of matched positions, dividing the number of matched positions by the total number of positions in the window of comparison (i.e., the window size), and multiplying the result by 100 to yield the percentage of sequence identity. Optimal alignment of sequences for aligning a comparison window may be conducted by computerized implementations of algorithms (GAP, BESTFIT, FASTA, and TFASTA in the Wisconsin Genetics Software Package Release 7.0, Genetics Computer Group, 575 Science Drive Madison, Wis., USA) or by inspection and the best alignment (i.e., resulting in the highest percentage homology over the comparison window) generated by any of the various methods selected. Reference also may be made to the BLAST family of programs as for example disclosed by Altschul et al., Nucl. Acids Res. 25:3389, 1997.

[0096] The term “solubility” refers to the property of an agent (e.g., activatable proprotein) provided herein to dissolve in a liquid solvent and form a homogeneous solution. Solubility is typically expressed as a concentration, either by mass of solute per unit volume of solvent (g of solute per kg of solvent, g per dL (100 mL), mg/ml, etc.), molarity, molality, mole fraction or other similar descriptions of concentration. The maximum equilibrium amount of solute that can dissolve per amount of solvent is the solubility of that solute in that solvent under the specified conditions, including temperature, pressure, pH, and the nature of the solvent. In certain embodiments, solubility is measured at physiological pH, or other pH, for example, at pH 5.0, pH 6.0, pH 7.0, pH 7.4, pH 7.6, pH 7.8, or pH 8.0 (e.g., about pH 5-8). In certain embodiments, solubility is measured in water or a physiological buffer such as PBS or NaCl (with or without NaPO₄). In specific embodiments, solubility is measured at relatively lower pH (e.g., pH 6.0) and relatively higher salt (e.g., 500 mM NaCl and 10 mM NaPO₄). In certain embodiments, solubility is measured in a biological fluid (solvent) such as blood or serum. In certain embodiments, the temperature can be about room temperature (e.g., about 20, 21, 22, 23, 24, 25° C.) or about body temperature (37° C.). In certain embodiments, an agent has a solubility of at least about 0.1, 0.2, 0.3, 0.4, 0.5, 0.6, 0.7, 0.8, 0.9, 1, 2, 3, 4, 5, 6, 7, 8, 9, 10, 11, 12, 13, 14, 15, 16, 17, 18, 19, 20, 25, 30, 40, 50, 60, 70, 80, 90 or 100 mg/ml at room temperature or at 37° C.

[0097] A “subject” or a “subject in need thereof” or a “patient” or a “patient in need thereof” includes a mammalian subject such as a human subject.

[0098] “Substantially” or “essentially” means nearly totally or completely, for instance, 95%, 96%, 97%, 98%, 99% or greater of some given quantity.

[0099] By “statistically significant,” it is meant that the result was unlikely to have occurred by chance. Statistical significance can be determined by any method known in the art. Commonly used measures of significance include the p-value, which is the frequency or probability with which the observed event would occur, if the null hypothesis were true. If the obtained p-value is smaller than the significance level, then the null hypothesis is rejected. In simple cases, the significance level is defined at a p-value of 0.05 or less.

[0100] “Therapeutic response” refers to improvement of symptoms (whether or not sustained) based on administration of one or more therapeutic agents.

[0101] As used herein, the terms “therapeutically effective amount”, “therapeutic dose,” “prophylactically effective amount,” or “diagnostically effective amount” is the amount of an agent (e.g., activatable proprotein, activated protein) needed to elicit the desired biological response following administration.

[0102] As used herein, “treatment” of a subject (e.g., a mammal, such as a human) or a cell is any type of intervention used in an attempt to alter the natural course of the individual or cell. Treatment includes, but is not limited to, administration of a pharmaceutical composition, and may be performed either prophylactically or subsequent to the initiation of a pathologic event or contact with an etiologic agent. Also included are “prophylactic” treatments, which can be directed to reducing the rate of progression of the disease or condition being treated, delaying the onset of that disease or condition, or reducing the severity of its onset. “Treatment” or “prophylaxis” does not necessarily indicate complete eradication, cure, or prevention of the disease or condition, or associated symptoms thereof.

[0103] The term “wild-type” refers to a gene or gene product (e.g., a polypeptide) that is most frequently observed in a population and is thus arbitrarily designed the “normal” or “wild-type” form of the gene.

[0104] Each embodiment in this specification is to be applied to every other embodiment unless expressly stated otherwise.

### Activatable Proproteins

[0105] Embodiments of the present disclosure relate to activatable proprotein homodimers, or prodrugs, comprising two IL-2 protein variants that remain relatively inactive in the proprotein form, and which can be activated upon contact with the appropriate environment. The activatable proproteins described herein comprise at least two separate but otherwise identical (or substantially identical) polypeptide chains, which bind together via non-covalent interactions and/or certain covalent bonds, for example, disulfide bonds, but not via peptide or amide bonds. Generally, each polypeptide chain comprises an IL-2 protein variant, an IL-2 binding protein such as an IL-2Rα protein or variant thereof, and a cleavable linker. Here, the IL-2 protein variant of the first polypeptide binds to the IL-2 binding protein of the second polypeptide, and the IL-2 protein of the second polypeptide binds to the IL-2 binding protein of the first polypeptide, to form a relatively stable homodimer in which these binding interactions block or sterically hinder the IL-2 proteins in each chain from interacting with or binding to their cognate receptor(s) on a cell. In some instances, each polypeptide chain comprises a purification tag at the N- or C-terminus, which is separated from the rest of the polypeptide by a linker. In some instances, each polypeptide chain comprises a binding domain (for example, an Fc domain or a fragment thereof) at the N- or C-terminus, which is separated from the rest of the polypeptide by a linker, and which binds to the binding domain on the other polypeptide chain to further stabilize the proprotein homodimer. As noted above, at least one of the linkers is a cleavable linker, which upon cleavage in a target cell or tissue restores IL-2 activity by opening the homodimer and exposing at least one active or binding site of the IL-2 protein variants. Such allows the IL-2 portions of the now activated protein(s) to interact with or bind to certain of their cognate receptor(s), for example, IL-2Rβ/γc and/or IL-2Rα/β/γc receptor chains on an immune cell, and thereby effect downstream immune cell-signaling pathways.

[0106] In these and related embodiments, the IL-2 protein variant comprises one or more amino acid alterations relative to a wild-type IL-2 sequence (i.e., human sequence), for example, at one or more residues that form a salt bridge with IL-2Rα (see, for example, FIGS. 5A-5D), and has reduced binding affinity to wild-type IL-2Rα relative to that of the wild-type IL-2 sequence.

[0107] The activatable proproteins described herein address many of the drawbacks of standard IL-2 therapies in the treatment of cancer, infectious diseases, and other diseases, including high initial serum Cₘₐₓ, which causes over-activation of the immune system, preferential activation of regulatory T cells expressing IL-2Rα/β/γc receptor chains relative to immune cells expressing IL-2Rβ/γc receptor chains, short PK because of the otherwise small molecular size of IL-2 and/or catabolism by the large number of immune cells that express IL-2 receptors, poor accumulation in the target tissues (e.g., cancers, tumors) because of the short PK and/or ineffective tumor targeting, and undesirable accumulation and immune activation in normal tissues.

[0108] Embodiments of the present disclosure thus include an activatable proprotein homodimer (complex), comprising a first polypeptide (chain) and a second polypeptide (chain),

[0109] wherein the first polypeptide and the second polypeptide comprise, in an N- to C-terminal orientation, or a C- to N-terminal orientation, a binding moiety, a first linker, an IL-2 protein variant, a second linker, and an IL-2 binding protein;

[0110] or wherein the first polypeptide and the second polypeptide comprise, in an N- to C-terminal orientation, or a C- to N-terminal orientation, a binding moiety, a first linker, an IL-2 binding protein, a second linker, and an IL-2 protein variant,

[0111] wherein the binding moiety of the first polypeptide binds to the binding moiety of the second polypeptide, wherein the IL-2 protein variant of the first polypeptide binds to the IL-2 binding protein of the second polypeptide, and wherein the IL-2 binding protein of the first polypeptide binds to the IL-2 protein variant of the second polypeptide, wherein said (collective) binding masks a binding site of IL-2 protein variant(s) that otherwise binds to an IL-2Rβ/γc and/or IL-2Rα/β/γc chain present on the surface of an immune cell in vitro or in vivo, wherein at least one of the first or the second linker is a cleavable linker, and wherein the IL-2 protein variant(s) comprise one or more amino acid alterations relative to a wild-type IL-2 sequence (i.e., human sequence), and have reduced binding affinity to wild-type IL-2Rα relative to that of the wild-type IL-2 sequence, as described herein.

[0112] Also included is an activatable proprotein homodimer (complex), comprising a first polypeptide (chain) and a second polypeptide (chain),

[0113] wherein the first and the second polypeptide comprise, in an N- to C-terminal orientation, or a C- to N-terminal orientation, an IL-2 protein variant, a first linker, an IL-2 binding protein, a second linker, and optionally an affinity purification tag;

[0114] or wherein the first and the second polypeptide comprise, in an N- to C-terminal orientation, or a C- to N-terminal orientation, an IL-2 binding protein, a first linker, an IL-2 protein variant, a second linker, and optionally an affinity purification tag,

[0115] wherein the IL-2 protein of the first polypeptide binds to the IL-2 binding protein of the second polypeptide, and wherein the IL-2 binding protein of the first polypeptide binds to the IL-2 protein of the second polypeptide, wherein said (collective) binding masks a binding site of IL-2 protein(s) that otherwise binds to an IL-2Rβ/γc and/or IL-2Rα/β/γc chain present on the surface of an immune cell in vitro or in vivo, wherein the first linker is a cleavable linker, and wherein the IL-2 protein variant(s) comprise one or more amino acid alterations relative to a wild-type IL-2 sequence (i.e., human sequence), and have reduced binding affinity to wild-type IL-2Rα relative to that of the wild-type IL-2 sequence, as described herein.

[0116] As noted above, the IL-2 protein variant(s) and the IL-2 binding protein(s) interact or bind together, for example, via non-covalent interactions or certain covalent bonds (e.g., disulfide bonds). In some instances, the binding of the IL-2 protein variant(s) to the IL-2 binding protein(s), for example, IL-2Rα protein(s), sterically blocks or hinders binding of the IL-2 protein variant(s) to their cognate IL-2Rα/β/γc receptor chains expressed on regulatory T-cells (T_{regs}). In some instances, that binding and steric hindrance is preserved in the activated form of the protein, and can provide the advantage of minimizing the activation of immunosuppressive T_{regs}, and reducing the consumption of the proprotein and the active protein alike. Exemplary IL-2 protein variants and IL-2 binding proteins are described elsewhere herein.

[0117] In some instances, the binding moieties of the first and second polypeptides dimerize together via at least one non-covalent interaction, at least one covalent bond (for example, at least one disulfide bond), or any combination of non-covalent interactions and covalent bonds, to further stabilize the activatable proprotein and/or to further mask the binding of the IL-2 proteins to their cognate receptors, for example, IL-2Rα/β/γc and/or IL-2Rβ/γc receptor chains. Typically, however, binding moieties of the first and second polypeptide do not bind together or dimerize via a peptide or amide bond. In some embodiments, the binding moieties bind together as a heterodimer, that is, a heterodimer composed of two different binding moieties. In some embodiments, the binding moieties bind together as a homodimer, that is, a homodimer composed of two identical or nearly identical binding moieties. Thus, the binding moieties of the first and second polypeptides can be the same (or substantially the same) or different. In most instances, the binding moieties of the first and second polypeptides are the same, and do not bind to the IL-2 protein variant, or the IL-2 binding protein. However, in some instances, one or both of the binding moieties can bind to the IL-2 protein variant and/or the IL-2 binding protein. Exemplary binding moieties are described herein.

[0118] As noted above, at least one of the linkers comprises a cleavable linker, for example, a linker cleavable by a protease. In some instances, one linker comprises a cleavable linker and the other linker is a stable (e.g., physiologically stable) linker. In some instances, both linkers comprise cleavable linkers. In some instances, the protease is expressed in target tissues or cells, for example, cancer tissues or cancer cells. Cleavage of the linker in that context releases a masking moiety, removes the steric hindrance of the IL-2 protein variant, and allows selective activation of the IL-2 protein variant in diseased tissues or cells, relative to normal or healthy tissues or cells. Such selective and localized activation not only reduces needless consumption of administered IL-2, thereby increasing its half-life, but also enhances tissue penetration and reduces undesirable systemic effects of IL-2, among other advantages. Exemplary linkers are described herein.

[0119] In some embodiments, the homodimeric binding between the first and second polypeptides allosterically inhibits the binding of the IL-2 protein variants to their target, for example, cognate IL-2Rβ/γc and/or IL-2Rα/β/γc receptor chains on the surface of an immune cell. In these and related embodiments, the activatable proprotein shows no binding or substantially no binding to its target, or no more than 0.001%, 0.01%, 0.1%, 1%, 2%, 3%, 4%, 5%, 6%, 7%, 8%, 9%, 10%, 15%, 20%, 25%, 30%, 35%, 40%, or 50% binding to its target, as compared to the binding of the active domain or the IL-2 protein alone, optionally for at least 2, 4, 6, 8, 12, 28, 24, 30, 36, 48, 60, 72, 84, 96 hours, or 5, 10, 15, 30, 45, 60, 90, 120, 150, 180 days, or 1, 2, 3, 4, 5, 6, 7, 8, 9, 10, 11, 12 months or greater, optionally as measured in vivo or in a Target Displacement in vitro assay available in the art.

[0120] The various components of each polypeptide chain can be fused in any orientation. For example, in some embodiments, the first polypeptide and the second polypeptide of comprise, in an N- to C-terminal orientation, the binding moiety, the first linker, the IL-2 protein variant, the second linker, and the IL-2 binding protein. In some embodiments, the first polypeptide and the second polypeptide of comprise, in an N- to C-terminal orientation, the IL-2 binding protein, the first linker, the IL-2 protein variant, the second linker, and the binding moiety. In certain embodiments, the first polypeptide and the second polypeptide comprise, in an N- to C-terminal orientation, the binding moiety, the first linker, the IL-2 binding protein, the second linker, and the IL-2 protein variant. In some embodiments, the first polypeptide and the second polypeptide comprise, in an N- to C-terminal orientation, the IL-2 protein variant, the first linker, the IL-2 binding protein, the second linker, and the binding moiety. In particular embodiments, the first polypeptide and the second polypeptide comprise, in an N- to C-terminal orientation, the IL-2 protein variant, the first linker, the IL-2 binding protein, the second linker, and the affinity purification tag. In some embodiments, the first polypeptide and the second polypeptide of (d) comprise, in an N- to C-terminal orientation, the IL-2 binding protein, the first linker, the IL-2 protein variant, the second linker, and the affinity purification tag. Other possible orientations will be apparent to persons skilled in the art.

[0121] Certain activatable proproteins described herein include the advantage of effectively restoring the activity of the shielded effector molecule (IL-2 and IL-2 variants), unlike other common proprotein designs such as those described in WO2009025846A2, where upon protease cleavage, full dissociation of the binding between the effector molecule and the masking unit is required to restore the biological activity of the effector molecule. In the activatable proproteins described herein, the steric hindrance can be released by simply breaking the linker sequence that holds the protein domains spatially arranged to block the receptor access on the active site on the effector molecule, without the need for the binding domains to fully dissociate. Such an approach can thus provide a more effective and efficient way to restore the biological activity of an effector molecule.

[0122] Certain activatable proproteins described here include the fusion to additional binding domains, such as an Fc domain or Fc region. In some instances, dimeric Fc not only provides a convenient means for protein purification and the advantage of prolonging the in vivo half life of the proteins, but also stabilizes the dimeric proprotein of IL-2 (or IL-2 variant) and IL-2 binding protein (such as IL-2Rα or variant), to provide more effective shielding of the activity in the proprotein homodimer. Certain embodiments include the fusion to additional binding domains, such as an Fc region, where dimeric Fc and the linkers between Fc and the fusion partners can provide additional shielding effects of the activity in the proprotein.

[0123] Certain activatable proproteins are composed only of two of the foregoing protein chains, that is, they are composed only of a first polypeptide and a second polypeptide, as described herein. In some instances, however, certain activatable proproteins comprise multiple chains, for example, where the first and second polypeptide chains form a “core structure” upon which additional or higher-order structures can be built, the various core structures being optionally bound together via additional protein binding domains.

[0124] The individual components of the activatable proproteins are described in greater detail herein.

[0125] IL-2 Protein Variants. The activatable proproteins described herein comprise at least one “IL-2 protein variant” (or Interleukin-2 protein), including human IL-2 proteins, which comprise one or more amino acid alterations relative to a wild-type IL-2 sequence (i.e., human sequence), and have reduced binding affinity to wild-type IL-2Rα relative to that of the wild-type IL-2 sequence, as described herein. IL-2 is a cytokine signals through the IL-2 receptor (IL-2R), a complex composed of up to three chains, termed the α (CD25), β (CD122) and γc (CD132) chains IL-2 is produced by T-cells in response to antigenic or mitogenic stimulation, and is required for T-cell proliferation and other activities crucial to regulation of the immune response. IL-2 can stimulate B-cells, monocytes, lymphokine-activated killer cells, natural killer cells, and glioma cells, among other immune cells.

[0126] In some embodiments, an IL-2 protein variant has a reduced binding affinity to wild-type IL-2Rα of about or at least about 2-fold, 5-fold, 10-fold, 50-fold, 100-fold, 1000-fold or more, relative to the binding affinity of the wild-type IL-2 sequence. Certain exemplary IL-2 protein variants comprise one or more amino acid substitutions of a positively charged amino acid to a negatively charged amino acid, and/or one or more amino acid substitutions of a negatively charged amino acid to a positively charged amino acid. In particular embodiments, the one or more substitutions are at residue(s) that form a salt bridge with IL-2Rα (see, for example, FIGS. 5A-5D). Illustrative examples include amino acid substitutions selected from one or more of K35D, K35E, R38D, R38E, K43D, K43E, E61K, E61R, E62K, and E62R, as defined by the sequence of the mature form of IL-2 (see, for example, SEQ ID NO: 2).

[0127] IL-2 is a 15-16 kDA protein composed of a signal peptide (residues 1-20) and an active mature protein (residues 21-153). Exemplary human IL-2 amino acid sequences are provided in Table S1 below.

TABLE S1
Exemplary IL-2 Peptides

| | | SEQ ID |
|---|---|---|
| Name | Sequence | NO: |
| Human IL-2 | MYRMQLLSCIALSLALVTNSAPTSSSTKKTQLQLEHLLLDLQMILNGINN | 1 |
| FL | YKNPKLTRMLTFKFYMPKKATELKHLQCLEEELKPLEEVLNLAQSKNFHL | |
| Precursor | RPRDLISNINVIVLELKGSETTFMCEYADETATIVEFLNRWITFCQSIIS | |
| | TLT | |
| Human IL-2 | APTSSSTKKTQLQLEHLLLDLQMILNGINNYKNPKLTRMLTFKFYMPKKA | 2 |
| mature form | TELKHLQCLEEELKPLEEVLNLAQSKNFHLRPRDLISNINVIVLELKGSE | |
| C125S | TTFMCEYADETATIVEFLNRWITFSQSIISTLT | |
| Human IL-2 | APTSSSTKKTQLQLEHLLLDLQMILNGINNYKNPKLTRMLTFKFYMPKKA | 3 |
| mature form | TELKHLQCLEEELKPLEEVLNLAHSKNFHFDPRDVVSNINVFVLELKGSE | |
| (D10) | TTFMCEYADETATIVEFLNRWITFCQSIISTLT | |
| Q74H, L80F, | | |
| R81D, L85V, | | |
| I86V, and | | |
| I92F | | |
| Human IL-2 | STKKTQLQLEHLLLDLQMILNGINNYKNPKLTEMLTFEFYMPKKATELKH | 7 |
| mature form | LQCLEEELKPLEEVLNLAQSKNFHLRPRDLISNINVIVLELKGSETTFMC | |
| with | EYADETATIVEFLNRWITFCQSIISTLT | |
| R38E_K43E | | |
| Human IL-2 | STKKTQLQLEHLLLDLQMILNGINNYKNPKLTEMLTFKFYMPKKATELKH | 8 |
| mature form | LQCLEKELKPLEEVLNLAQSKNFHLRPRDLISNINVIVLELKGSETTFMC | |
| with | EYADETATIVEFLNRWITFCQSIISTLT | |
| R38E_E61K | | |
| Human IL-2 | STKKTQLQLEHLLLDLQMILNGINNYKNPKLTEMLTFKFYMPKKATELKH | 9 |
| mature form | LQCLEEKLKPLEEVLNLAQSKNFHLRPRDLISNINVIVLELKGSETTFMC | |
| with | EYADETATIVEFLNRWITFCQSIISTLT | |
| R38E_E62K | | |
| Human IL-2 | STKKTQLQLEHLLLDLQMILNGINNYKNPKLTEMLTFEFYMPKKATELKH | 10 |
| mature form | LQCLEKELKPLEEVLNLAQSKNFHLRPRDLISNINVIVLELKGSETTFMC | |
| with | EYADETATIVEFLNRWITFCQSIISTLT | |
| R38E_K43E_ | | |
| E61K | | |
| Human IL-2 | STKKTQLQLEHLLLDLQMILNGINNYKNPKLTEMLTFEFYMPKKATELKH | 11 |
| mature form | LQCLEEKLKPLEEVLNLAQSKNFHLRPRDLISNINVIVLELKGSETTFMC | |
| with | EYADETATIVEFLNRWITFCQSIISTLT | |
| R38E_K43E_ | | |
| E62K | | |
| Human IL-2 | STKKTQLQLEHLLLDLQMILNGINNYKNPKLTEMLTFKFYMPKKATELKH | 12 |
| mature form | LQCLEKKLKPLEEVLNLAQSKNFHLRPRDLISNINVIVLELKGSETTFMC | |
| with | EYADETATIVEFLNRWITFCQSIISTLT | |
| R38E_E61K_ | | |
| E62K | | |
| Human IL-2 | STKKTQLQLEHLLLDLQMILNGINNYKNPKLTEMLTFEFYMPKKATELKH | 13 |
| mature form | LQCLEKKLKPLEEVLNLAQSKNFHLRPRDLISNINVIVLELKGSETTFMC | |
| with | EYADETATIVEFLNRWITFCQSIISTLT | |
| R38E_K43E_ | | |
| E61K_E62K | | |
| Human IL-2 | STKKTQLQLEHLLLDLQMILNGINNYKNPKLTEMLTFEFYMPKKATELKH | 14 |
| mature form | LQCLEEKLKPLEEALNLAPSKNFHLRPRDLISNINVIVLELKGSETTFMC | |
| with V69A, | EYADETATIVEFLNRWITFCQSTISTLT | |
| Q74P and | | |
| I128T_ | | |
| R38E_K43E_ | | |
| E62K | | |
| Human IL-2 | STKKTQLQLEHLLLDLQMILNGINNYKNPKLTEMLTFKFYMPKKATELKH | 15 |
| mature form | LQCLEKKLKPLEEALNLAPSKNFHLRPRDLISNINVIVLELKGSETTFMC | |
| with V69A, | EYADETATIVEFLNRWITFCQSTISTLT | |
| Q74P and | | |
| I128T_R38E_ | | |
| E61K_E62K | | |
| Human IL-2 | STKKTQLQLEHLLLDLQMILNGINNYKNPKLTEMLTFEFYMPKKATELKH | 16 |
| mature form | LQCLEKKLKPLEEALNLAPSKNFHLRPRDLISNINVIVLELKGSETTFMC | |
| with V69A, | EYADETATIVEFLNRWITFCQSTISTLT | |
| Q74P and | | |
| I128T_ | | |
| R38E_K43E_ | | |
| E61K_E62K | | |
| Human IL-2 | APTSSSTKKTQLQLEHLLLDLQMILNGINNYKNPKLTRMLTFKFAMPKKA | 17 |
| mature form | TELKHLQCLEEELKPLEEVLNLAQSKNFHLRPRDLISNINVIVLELKGSE | |
| with Y45A | TTFMCEYADETATIVEFLNRWITFCQSIISTLT | |
| Human IL-2 | APTSSSTKKTQLQLEHLLLDLQMILNGINNYKNPKLTRMLTAKFAMPKKA | 18 |
| mature form | TELKHLQCLEEELKPLEEVLNLAQSKNFHLRPRDLISNINVIVLELKGSE | |
| with F42A | TTFMCEYADETATIVEFLNRWITFCQSIISTLT | |
| and Y45A | | |
| Human IL-2 | APTSSSTKKTQLQLEHLLLDLQMILNGINNYKNPKLTRMLTFKFYMPKKA | 19 |
| mature form | TELKHLQCLESELKPLEEVLNLAQSKNFHLRPRDLISNINVIVLELKGSE | |
| with E61S | TTFMCEYADETATIVEFLNRWITFCQSIISTLT | |
| Human IL-2 | APASSSTKKTQLQLEHLLLDLQMILNGINNYKNPKLTRMLTFKFYMPKKA | 20 |
| mature form | TELKHLQCLEEELKPLEEVLNLAQSKNFHLRPRDLISNINVIVLELKGSE | |
| with T3A | TTFMCEYADETATIVEFLNRWITFCQSIISTLT | |
| Human IL-2 | APASSSTKKTQLQLEHLLLDLQMILNGINNYKNPKLTEMLTFKFYMPKKA | 21 |
| mature form | TELKHLQCLEEELKPLEEVLNLAQSKNFHLRPRDLISNINVIVLELKGSE | |
| with | TTFMCEYADETATIVEFLNRWITFCQSIISTLT | |
| R38E_T3A | | |
| Human IL-2 | APASSSTKKTQLQLEHLLLDLQMILNGINNYKNPKLTDMLTFKFYMPKKA | 22 |
| mature form | TELKHLQCLEEELKPLEEVLNLAQSKNFHLRPRDLISNINVIVLELKGSE | |
| with | TTFMCEYADETATIVEFLNRWITFCQSIISTLT | |
| R38D_T3A | | |
| Human IL-2 | APASSSTKKTQLQLEHLLLDLQMILNGINNYKNPKLTRMLTFEFYMPKKA | 23 |
| mature form | TELKHLQCLEEELKPLEEVLNLAQSKNFHLRPRDLISNINVIVLELKGSE | |
| with | TTFMCEYADETATIVEFLNRWITFCQSIISTLT | |
| K43E_T3A | | |
| Human IL-2 | APASSSTKKTQLQLEHLLLDLQMILNGINNYKNPKLTRMLTFKFYMPKKA | 24 |
| mature form | TELKHLQCLEKELKPLEEVLNLAQSKNFHLRPRDLISNINVIVLELKGSE | |
| with | TTFMCEYADETATIVEFLNRWITFCQSIISTLT | |
| E61K_T3A | | |
| Human IL-2 | APASSSTKKTQLQLEHLLLDLQMILNGINNYKNPKLTRMLTFKFYMPKKA | 25 |
| mature form | TELKHLQCLERELKPLEEVLNLAQSKNFHLRPRDLISNINVIVLELKGSE | |
| with | TTFMCEYADETATIVEFLNRWITFCQSIISTLT | |
| E61R_T3A | | |
| Human IL-2 | APASSSTKKTQLQLEHLLLDLQMILNGINNYKNPKLTRMLTFKFYMPKKA | 26 |
| mature form | TELKHLQCLEEKLKPLEEVLNLAQSKNFHLRPRDLISNINVIVLELKGSE | |
| with | TTFMCEYADETATIVEFLNRWITFCQSIISTLT | |
| E62K_T3A | | |
| Human IL-2 | APASSSTKKTQLQLEHLLLDLQMILNGINNYKNPKLTRMLTFKFYMPKKA | 27 |
| mature form | TELKHLQCLEERLKPLEEVLNLAQSKNFHLRPRDLISNINVIVLELKGSE | |
| with | TTFMCEYADETATIVEFLNRWITFCQSIISTLT | |
| E62R_T3A | | |
| Human IL-2 | APASSSTKKTQLQLEHLLLDLQMILNGINNYKNPKLTEMLTFEFYMPKKA | 28 |
| mature form | TELKHLQCLEEELKPLEEVLNLAQSKNFHLRPRDLISNINVIVLELKGSE | |
| with | TTFMCEYADETATIVEFLNRWITFCQSIISTLT | |
| R38E_K43E_ | | |
| T3A | | |
| Human IL-2 | APASSSTKKTQLQLEHLLLDLQMILNGINNYKNPKLTDMLTFEFYMPKKA | 29 |
| mature form | TELKHLQCLEEELKPLEEVLNLAQSKNFHLRPRDLISNINVIVLELKGSE | |
| with | TTFMCEYADETATIVEFLNRWITFSQSIISTLT | |
| R38D_K43E_ | | |
| T3A | | |
| Human IL-2 | APASSSTKKTQLQLEHLLLDLQMILNGINNYKNPKLTEMLTFKFYMPKKA | 30 |
| mature form | TELKHLQCLEKELKPLEEVLNLAQSKNFHLRPRDLISNINVIVLELKGSE | |
| with | TTFMCEYADETATIVEFLNRWITFCQSIISTLT | |
| R38E_E61K_ | | |
| T3A | | |
| Human IL-2 | APASSSTKKTQLQLEHLLLDLQMILNGINNYKNPKLTDMLTFKFYMPKKA | 31 |
| mature form | TELKHLQCLEKELKPLEEVLNLAQSKNFHLRPRDLISNINVIVLELKGSE | |
| with | TTFMCEYADETATIVEFLNRWITFCQSIISTLT | |
| R38D_E61K_ | | |
| T3A | | |
| Human IL-2 | APASSSTKKTQLQLEHLLLDLQMILNGINNYKNPKLTRMLTFEFYMPKKA | 32 |
| mature form | TELKHLQCLEKELKPLEEVLNLAQSKNFHLRPRDLISNINVIVLELKGSE | |
| with | TTFMCEYADETATIVEFLNRWITFCQSIISTLT | |
| K43E_E61K_ | | |
| T3A | | |
| Human IL-2 | APASSSTKKTQLQLEHLLLDLQMILNGINNYKNPKLTDMLTFEFYMPKKA | 33 |
| mature form | TELKHLQCLEKELKPLEEVLNLAQSKNFHLRPRDLISNINVIVLELKGSE | |
| with | TTFMCEYADETATIVEFLNRWITFCQSIISTLT | |
| R38D_K43E_ | | |
| E61K_T3A | | |
| Human IL-2 | APASSSTKKTQLQLEHLLLDLQMILNGINNYKNPKLTDMLTAEFYMPKKA | 34 |
| mature form | TELKHLQCLEEELKPLEEVLNLAQSKNFHLRPRDLISNINVIVLELKGSE | |
| with | TTFMCEYADETATIVEFLNRWITFCQSIISTLT | |
| R38D_F42A_ | | |
| K43E_T3A | | |
| Human IL-2 | APASSSTKKTQLQLEHLLLDLQMILNGINNYKNPKLTRMLTAEFYMPKKA | 35 |
| mature form | TELKHLQCLEKELKPLEEVLNLAQSKNFHLRPRDLISNINVIVLELKGSE | |
| with | TTFMCEYADETATIVEFLNRWITFCQSIISTLT | |
| F42A_K43E_ | | |
| E61K_T3A | | |

[0128] Thus, in certain embodiments, an IL-2 protein variant comprises, consists, or consists essentially of an amino acid sequence selected from Table S1, or an active variant or fragment thereof that is at least 80, 85, 90, 95, 98, or 100% identical to a sequence selected from Table S1, and which has reduced binding affinity to wild-type IL-2Rα relative to that of the wild-type IL-2 sequence. In some embodiments, an IL-2 protein variant is selected from Table S1 and comprises one or more amino acid substitutions of a positively charged amino acid to a negatively charged amino acid, and/or one or more amino acid substitutions of a negatively charged amino acid to a positively charged amino acid. Certain IL-2 protein variants from Table S1 comprise or retain one or more amino acid substitutions selected from K35D, K35E, R38D, R38E, K43D, K43E, E61K, E61R, E62K, and E62R, including combinations thereof, as defined by the sequence of the mature form of IL-2 (see, for example, SEQ ID NO: 2). In certain of these and related embodiments, the IL-2 protein variant has a reduced binding affinity to wild-type IL-2Rα of about or at least about 2-fold, 5-fold, 10-fold, 50-fold, 100-fold, 1000-fold or more, relative to the binding affinity of the wild-type IL-2 sequence.

[0129] In some embodiments, an “active” IL-2 protein or fragment or variant is characterized, for example, by its ability to bind to an IL-2Rβ/γc and/or IL-2Rα/β/γc receptor chain present on the surface of an immune cell in vitro or in vivo, and stimulate downstream signaling activities, absent steric hindrance by the masking moieties described herein. Examples of downstream signaling activities include IL-2 mediated signaling via one or more of the JAK-STAT, PI3K/Akt/mTOR, and MAPK/ERK pathways, including combinations thereof. Altogether, IL-2 signaling stimulates an array of downstream pathways leading to responses that have a significant role in the development, function, and survival of CD4 T cells, CD8 T cells, NK cells, NKT cells, macrophages, and intestinal intraepithelial lymphocytes, among others.

[0130] In particular embodiments, the IL-2 protein variant is a mature form of IL-2, or an active variant or fragment thereof, which comprises, consists, or consists essentially of an amino acid sequence that is at least 80, 85, 90, 95, 98, or 100% identical to amino acids 21-153 of SEQ ID NO: 1, and which has reduced binding affinity to wild-type IL-2Rα relative to that of the wild-type IL-2 sequence. In some embodiments, the IL-2 protein comprises a C145X substitution, as defined by SEQ ID NO: 1, wherein X is any amino acid. In specific embodiments, the IL-2 protein comprises a C145S substitution as defined by SEQ ID NO: 1.

[0131] Certain IL-2 proteins comprise, consist, or consist essentially of an amino acid sequence that is at least 80, 85, 90, 95, 98, or 100% identical to SEQ ID NO: 2 (mature human IL-2 with C125S substitution). In some embodiments, an active variant or fragment of SEQ ID NO: 2 retains the S125 residue as defined therein.

[0132] Certain IL-2 protein variants comprise one or more defined amino acid substitutions relative to the exemplary amino acid sequences in Table S1. For example, some IL-2 proteins comprise one or more amino acid substitutions selected from A1, P2, A3, S4, and S5, including combinations thereof, as defined by the numbering of SEQ ID NO: 2, for example, to enhance the stability of IL-2 in the protein homodimer. In some embodiments, the IL-2 protein has deletion of 1, 2, 3, 4, or 5 amino acids at the N-terminus to enhance the stability of IL-2 and IL-2 in the fusion proteins (for example, the N-terminus of the mature form of IL-2, as illustrated by SEQ ID NO: 2).

[0133] It will be appreciated that any one or more of the foregoing IL-2 proteins can be combined with any of the other components described herein, for example, IL-2 bindings proteins such as IL-2Rα proteins, masking moieties including binding moieties and linkers, and other optional protein domains, to generate one or more activatable proproteins or larger, multi-chain structures comprising the same.

[0134] IL-2 Binding Proteins. The activatable proproteins described herein comprise at least one “IL-2 binding protein”. Examples of IL-2 binding proteins include IL-2Rα proteins, including human IL-2Rα protein variants. Exemplary IL-2Rα protein variants include human IL-2Rα proteins that comprise one or more amino acid alterations (e.g., substitutions) relative to a wild-type IL-2Rα sequence, and has reduced binding affinity to wild-type IL-2 relative to that of the wild-type IL-2Rα sequence. In some instances, the IL-2Rα protein variant has a reduced binding affinity to wild-type IL-2 of about or at least about 2-fold, 5-fold, 10-fold, 50-fold, 100-fold, 1000-fold or more, relative to the binding affinity of the wild-type IL-2Rα sequence. Examples include human IL-2Rα protein variants comprising one or more amino acid substitutions of a positively charged amino acid to a negatively charged amino acid, and/or one or more amino acid substitutions of a negatively charged amino acid to a positively charged amino acid. In particular embodiments, the one or more substitutions are at residue(s) that form a salt bridge with IL-2 (see, for example, FIGS. 5A-5D). In some embodiments, the IL-2Rα protein variant comprises one or more amino acid substitutions selected from D4R, D4K, D6R, D6K, E29R, E29K, K38D, K38E, R36D, and R36E, as defined by SEQ ID NO: 6, including combinations thereof.

[0135] In particular embodiments, the IL-2 binding protein is a human IL-2Rα protein, or a variant or fragment thereof that binds to an IL-2 protein. Exemplary human IL-2Rα amino acid sequences are provided in Table S2 below.

TABLE S2
Exemplary IL-2Rα Proteins

| | | SEQ ID |
|---|---|---|
| Name | Sequence | NO: |
| Human IL- | MDSYLLMWGLLTFIMVPGCQAELCDDDPPEIPHATFKAMAYKEGTMLNCECK | 4 |
| 2Rα FL | RGFRRIKSGSLYMLCTGNSSHSSWDNQCQCTSSATRNTTKQVTPQPEEQKER | |
| | KTTEMQSPMQPVDQASLPGHCREPPPWENEATERIYHFVVGQMVYYQCVQGY | |
| | RALHRGPAESVCKMTHGKTRWTQPQLICTGEMETSQFPGEEKPQASPEGRPE | |
| | SETSCLVTTTDFQIQTEMAATMETSIFTTEYQVAVAGCVFLLISVLLLSGLT | |
| | WQRRQRKSRRTI | |
| Human IL- | ELCDDDPPEIPHATFKAMAYKEGTMLNCECKRGFRRIKSGSLYMLCTGNSSH | 5 |
| 2Rα-ECD | SSWDNQCQCTSSATRNTTKQVTPQPEEQKERKTTEMQSPMQPVDQASLPGHC | |
| (22-240) | REPPPWENEATERIYHFVVGQMVYYQCVQGYRALHRGPAESVCKMTHGKTRW | |
| | TQPQLICTGEMETSQFPGEEKPQASPEGRPESETSCLVTTTDFQIQTEMAAT | |
| | METSIFTTEYQ | |
| Human IL- | ELCDDDPPEIPHATFKAMAYKEGTMLNCECKRGFRRIKSGSLYMLCTGNSSH | 6 |
| 2Rα-sushi | SSWDNQCQCTSSATRNTTKQVTPQPEEQKERKTTEMQSPMQPVDQASLPGHC | |
| (22-187) | REPPPWENEATERIYHFVVGQMVYYQCVQGYRALHRGPAESVCKMTHGKTRW | |
| | TQPQLICTGE | |
| Human IL- | ELCDDKPPEIPHATFKAMAYKEGTMLNCKCKRGFRRIKSGSLYMLCTGNSSH | 36 |
| 2Rα-sushi | SSWDNQCQCTSSATRNTTKQVTPQPEEQKERKTTEMQSPMQPVDQASLPGHC | |
| (22-187) | REPPPWENEATERIYHFVVGQMVYYQCVQGYRALHRGPAESVCKMTHGKTRW | |
| with | TQPQLICTGE | |
| D6K_E29K | | |
| Human IL- | ELCDDKPPEIPHATFKAMAYKEGTMLNCECKRGFRRIESGSLYMLCTGNSSH | 37 |
| 2Rα-sushi | SSWDNQCQCTSSATRNTTKQVTPQPEEQKERKTTEMQSPMQPVDQASLPGHC | |
| (22-187) | REPPPWENEATERIYHFVVGQMVYYQCVQGYRALHRGPAESVCKMTHGKTRW | |
| with | TQPQLICTGE | |
| D6K_K38E | | |
| Human IL- | ELCDDKPPEIPHATFKAMAYKEGTMLNCECKRGFREIKSGSLYMLCTGNSSH | 38 |
| 2Rα-sushi | SSWDNQCQCTSSATRNTTKQVTPQPEEQKERKTTEMQSPMQPVDQASLPGHC | |
| (22-187) | REPPPWENEATERIYHFVVGQMVYYQCVQGYRALHRGPAESVCKMTHGKTRW | |
| with | TQPQLICTGE | |
| D6K_R36E | | |
| Human IL- | ELCDDKPPEIPHATFKAMAYKEGTMLNCKCKRGFRRIESGSLYMLCTGNSSH | 39 |
| 2Rα-sushi | SSWDNQCQCTSSATRNTTKQVTPQPEEQKERKTTEMQSPMQPVDQASLPGHC | |
| (22-187) | REPPPWENEATERIYHFVVGQMVYYQCVQGYRALHRGPAESVCKMTHGKTRW | |
| with | TQPQLICTGE | |
| D6K_E29K_ | | |
| K38E | | |
| Human IL- | ELCDDKPPEIPHATFKAMAYKEGTMLNCKCKRGFREIKSGSLYMLCTGNSSH | 40 |
| 2Rα-sushi | SSWDNQCQCTSSATRNTTKQVTPQPEEQKERKTTEMQSPMQPVDQASLPGHC | |
| (22-187) | REPPPWENEATERIYHFVVGQMVYYQCVQGYRALHRGPAESVCKMTHGKTRW | |
| with | TQPQLICTGE | |
| D6K_E29K_ | | |
| R36E | | |
| Human IL- | ELCDDKPPEIPHATFKAMAYKEGTMLNCECKRGFREIESGSLYMLCTGNSSH | 41 |
| 2Rα-sushi | SSWDNQCQCTSSATRNTTKQVTPQPEEQKERKTTEMQSPMQPVDQASLPGHC | |
| (22-187) | REPPPWENEATERIYHFVVGQMVYYQCVQGYRALHRGPAESVCKMTHGKTRW | |
| with | TQPQLICTGE | |
| D6K_R36E_ | | |
| K38E | | |
| Human IL- | ELCDDKPPEIPHATFKAMAYKEGTMLNCKCKRGFREIESGSLYMLCTGNSSH | 42 |
| 2Rα-sushi | SSWDNQCQCTSSATRNTTKQVTPQPEEQKERKTTEMQSPMQPVDQASLPGHC | |
| (22-187) | REPPPWENEATERIYHFVVGQMVYYQCVQGYRALHRGPAESVCKMTHGKTRW | |
| with | TQPQLICTGE | |
| D6K_E29K_ | | |
| R36E_K38E | | |
| Human IL- | ELCDDKPPEIPHATFKAMAYKEGTMLNCKCKRGFREIKSGSLYMLCTGNSSH | 43 |
| 2Rα-sushi | SSWDNQCQCTSSATRNTTKQVTPQPEEQKERKTTEMQSPMQPVDQASLPGHC | |
| (22-187) | REPPPWENEATERIYHFVVGQMVYYQCVQGYRALHRGPAESVCKMTHGKTRW | |
| with | TQPQLICTGE | |
| D6K_E29K_ | | |
| R36E | | |
| Human IL- | ELCDDKPPEIPHATFKAMAYKEGTMLNCECKRGFREIESGSLYMLCTGNSSH | 44 |
| 2Rα-sushi | SSWDNQCQCTSSATRNTTKQVTPQPEEQKERKTTEMQSPMQPVDQASLPGHC | |
| (22-187) | REPPPWENEATERIYHFVVGQMVYYQCVQGYRALHRGPAESVCKMTHGKTRW | |
| with | TQPQLICTGE | |
| D6K_R36E_ | | |
| K38E | | |
| Human IL- | ELCDDKPPEIPHATFKAMAYKEGTMLNCKCKRGFREIESGSLYMLCTGNSSH | 45 |
| 2Rα-sushi | SSWDNQCQCTSSATRNTTKQVTPQPEEQKERKTTEMQSPMQPVDQASLPGHC | |
| (22-187) | REPPPWENEATERIYHFVVGQMVYYQCVQGYRALHRGPAESVCKMTHGKTRW | |
| with | TQPQLICTGE | |
| D6K_E29K_ | | |
| R36E_K38E | | |
| Human IL- | ELCDDKPPEIPHATFKAMAYKEGTMLNCECKRGFRRIKSGSLYMLCTGNSSH | 46 |
| 2Rα-sushi | SSWDNQCQCTSSATRNTTKQVTPQPEEQKERKTTEMQSPMQPVDQASLPGHC | |
| (22-187) | REPPPWENEATERIYHFVVGQMVYYQCVQGYRALHRGPAESVCKMTHGKTRW | |
| with D6K | TQPQLICTGE | |
| Human IL- | ELCDDRPPEIPHATFKAMAYKEGTMLNCECKRGFRRIKSGSLYMLCTGNSSH | 47 |
| 2Rα-sushi | SSWDNQCQCTSSATRNTTKQVTPQPEEQKERKTTEMQSPMQPVDQASLPGHC | |
| (22-187) | REPPPWENEATERIYHFVVGQMVYYQCVQGYRALHRGPAESVCKMTHGKTRW | |
| with D6R | TQPQLICTGE | |
| Human IL- | ELCDDDPPEIPHATFKAMAYKEGTMLNCKCKRGFRRIKSGSLYMLCTGNSSH | 48 |
| 2Rα-sushi | SSWDNQCQCTSSATRNTTKQVTPQPEEQKERKTTEMQSPMQPVDQASLPGHC | |
| (22-187) | REPPPWENEATERIYHFVVGQMVYYQCVQGYRALHRGPAESVCKMTHGKTRW | |
| with E29K | TQPQLICTGE | |
| Human IL- | ELCDDDPPEIPHATFKAMAYKEGTMLNCECKRGFRRIESGSLYMLCTGNSSH | 49 |
| 2Rα-sushi | SSWDNQCQCTSSATRNTTKQVTPQPEEQKERKTTEMQSPMQPVDQASLPGHC | |
| (22-187) | REPPPWENEATERIYHFVVGQMVYYQCVQGYRALHRGPAESVCKMTHGKTRW | |
| with K38E | TQPQLICTGE | |
| Human IL- | ELCDDDPPEIPHATFKAMAYKEGTMLNCECKRGFRRIDSGSLYMLCTGNSSH | 50 |
| 2R□□sushi | SSWDNQCQCTSSATRNTTKQVTPQPEEQKERKTTEMQSPMQPVDQASLPGHC | |
| (22-187) | REPPPWENEATERIYHFVVGQMVYYQCVQGYRALHRGPAESVCKMTHGKTRW | |
| with K38D | TQPQLICTGE | |
| Human IL- | ELCDDDPPEIPHATFKAMAYKEGTMLNCECKRGFREIKSGSLYMLCTGNSSH | 51 |
| 2Rα-sushi | SSWDNQCQCTSSATRNTTKQVTPQPEEQKERKTTEMQSPMQPVDQASLPGHC | |
| (22-187) | REPPPWENEATERIYHFVVGQMVYYQCVQGYRALHRGPAESVCKMTHGKTRW | |
| with R36E | TQPQLICTGE | |
| Human IL- | ELCDDDPPEIPHATFKAMAYKEGTMLNCECKRGFRDIKSGSLYMLCTGNSSH | 52 |
| 2Rα-sushi | SSWDNQCQCTSSATRNTTKQVTPQPEEQKERKTTEMQSPMQPVDQASLPGHC | |
| (22-187) | REPPPWENEATERIYHFVVGQMVYYQCVQGYRALHRGPAESVCKMTHGKTRW | |
| with R36D | TQPQLICTGE | |
| Human IL- | ELCDDRPPEIPHATFKAMAYKEGTMLNCKCKRGFRRIKSGSLYMLCTGNSSH | 53 |
| 2Rα-sushi | SSWDNQCQCTSSATRNTTKQVTPQPEEQKERKTTEMQSPMQPVDQASLPGHC | |
| (22-187) | REPPPWENEATERIYHFVVGQMVYYQCVQGYRALHRGPAESVCKMTHGKTRW | |
| with | TQPQLICTGE | |
| D6R E29K | | |
| Human IL- | ELCDDDPPEIPHATFKAMAYKEGTMLNCKCKRGFRRIESGSLYMLCTGNSSH | 54 |
| 2Rα-sushi | SSWDNQCQCTSSATRNTTKQVTPQPEEQKERKTTEMQSPMQPVDQASLPGHC | |
| (22-187) | REPPPWENEATERIYHFVVGQMVYYQCVQGYRALHRGPAESVCKMTHGKTRW | |
| with | TQPQLICTGE | |
| E29K_K38E | | |
| Human IL- | ELCDDRPPEIPHATFKAMAYKEGTMLNCKCKRGFRRIESGSLYMLCTGNSSH | 55 |
| 2Rα-sushi | SSWDNQCQCTSSATRNTTKQVTPQPEEQKERKTTEMQSPMQPVDQASLPGHC | |
| (22-187) | REPPPWENEATERIYHFVVGQMVYYQCVQGYRALHRGPAESVCKMTHGKTRW | |
| with | TQPQLICTGE | |
| D6R_E29K_ | | |
| K38E | | |

[0136] Thus, in certain embodiments, an IL-2Rα protein comprises, consists, or consists essentially of an amino acid sequence selected from Table S2, or an active variant or fragment thereof that is at least 80, 85, 90, 95, 98, or 100% identical to a sequence selected from Table S2, and which binds to an IL-2 protein variant. In some embodiments, the IL-2Rα protein comprises, consists, or consists essentially of an amino acid sequence that is at least 80, 85, 90, 95, 98, or 100% to amino acids 22-187 or 22-240 of SEQ ID NO: 4 (full-length wild-type human IL-2Rα). In some embodiments, as noted above, the IL-2Rα protein from Table S2 comprises or retains one or more amino acid substitutions selected from D4R, D4K, D6R, D6K, E29R, E29K, K38D, K38E, R36D, and R36E, as defined by SEQ ID NO: 6, including combinations thereof.

[0137] Further to above, certain IL-2Rα proteins comprise one or more defined amino acid substitutions relative to the exemplary amino acid sequences in Table S2. For example, in some instances the IL-2Rα protein comprises one or more cysteine substitutions selected from D4C, DSC, D6C, E29C, R36C, and K38C, as defined by SEQ ID NO: 6. In some instances the IL-2Rα protein comprises one or more cysteine substitutions selected from D4C, DSC, and D6C, as defined by SEQ ID NO: 6, for example, to enhance the stability of IL-2Rα protein and the IL-2Rα in the proprotein homodimer. In some instances the IL-2Rα protein comprises one or more cysteine substitutions selected from D4C, D6C, N27C, K38C, S39C, L42C, Y43C, I118C, and H120C as defined by SEQ ID NO: 6 (human IL-2Rα Sushi 1 to Sushi 2 domain) In some instances, the IL-2Rα protein comprises an alanine substitution at position 49 and/or 68 as defined by SEQ ID NO: 6. In some embodiments, the IL-2Rα protein comprises a K38S substitution as defined by SEQ ID NO:6. Thus, an IL-2Rα protein can comprise any one or more of the foregoing amino acid substitutions, including combinations thereof.

[0138] In certain of these and related embodiments, the IL-2Rα protein forms at least one disulfide bond with the IL-2 protein via one or more of the foregoing cysteines and one or more cysteines in the IL-2 protein. In specific embodiments, the IL-2Rα and IL-2 protein form disulfide at least one disulfide bond between one or more cysteine pairs selected from IL-2-K35C and IL-2Rα-D4C, IL-2-R38C and IL-2Rα-D6C, IL-2-R38C and IL-2Rα-H120C, IL-2-T41C and IL-2Rα-I118C, IL-2-F42C and IL-2Rα-N27C, IL-2-E61C and IL-2Rα-K38C, IL-2-E61C and IL-2Rα-539C, and IL-2-V69C and IL-2Rα-L42C. In particular embodiments, as noted above, the binding (for example, disulfide binding) between the IL-2 protein and the IL-2Rα protein masks or sterically hinders the binding site of the IL-2 protein that preferentially binds to the IL-2Rα/β/γc chain expressed on T_{regs}. In some instances, the active or activated form of the protein, following cleavage of at least one linker and release of the corresponding masking moiety, retains the binding between the IL-2 protein and the IL-2Rα protein, and thus does not preferentially bind to the IL-2Rα/β/γc chain expressed on T_{regs}.

[0139] In certain embodiments, the IL-2 protein variant/IL-2Rα protein variant comprise one or more corresponding amino acid substitution pairs which alter the charge relationship between one or more IL-2/IL-2Rα salt bridges, and thereby reduce binding affinity of an IL-2 variant to wild-type IL-2Rα (see, for example, FIGS. 5A-5D). In some embodiments, the IL-2 protein variant/IL-2Rα protein variant comprise one or more corresponding amino acid substitution pairs selected from:

[0140] R38D/D6R, and K43E/E29A;

[0141] R38D/D6R, K43E/E29K, and F42A of IL-2;

[0142] E61K/K38E, and K43E/E29K, and F42A of IL-2;

[0143] K35D/D4R, K35D/D4K, K35E/D4R, and K35E/D4K;

[0144] R38D/D6R, R38D/D6K, R38E/D6R, and R38E/D6K;

[0145] K43D/E29R, K43D/E29K, K43E/E29R, and K43E/E29K;

[0146] E61K/K38D, E61K/K38E, E61R/K38D, and E61R/K38E; and

[0147] E62K/R36D, E62K/R36E, E62R/R36D, and E62R/R36E.

[0148] In certain of these and related embodiments, the IL-2 protein variant and the IL-2Rα protein variant have a binding affinity for each other that is lower than the binding affinity between wild-type IL-2 and wild-type IL-2Rα.

[0149] It will be appreciated that any one or more of the foregoing IL-2 binding proteins can be combined with any of the other components described herein, for example, IL-2 proteins, binding moieties, and linkers, and other optional protein domains, to generate one or more activatable proproteins or larger, multi-chain structures comprising the same.

[0150] Binding Moieties. As noted above, the activatable proprotein homodimers described herein comprise a first polypeptide and a second polypeptide, each of which comprises a “binding moiety”. The binding moiety facilitates and further stabilizes the binding interaction between the first and second polypeptides. In some embodiments, the binding moieties do not bind to the IL-2 protein or the IL-2 binding protein.

[0151] General examples of binding moieties are provided in Table M1 below.

TABLE M1
Exemplary Binding Moieties

Short peptide
Leucine zipper peptide
VH
VL
VH-CH1
VL-CL
VH-CL
VL-CH1
CH3
CH2CH3
Fab-CH3
Fab-CH2CH3
Antigen binding domain-CH3
Antigen binding domain-CH2CH3
CH3 variant
CH2CH3 variant
Fab-CH3 variant
Fab-CH2CH3 variant
Antigen binding domain-CH3 variant
Antigen binding domain-CH2CH3 variant

[0152] Thus, in certain embodiments, a binding moiety is selected from Table M1.

[0153] In particular embodiments, a binding moiety comprises an antigen binding domain of an immunoglobulin, including antigen binding fragments and variants thereof, such as a VL domain and/or a VH domain. In some embodiments, an antigen binding domain does not bind to an antigen, for example, a human antigen. In some embodiments, an antigen binding domain binds to an antigen, for example, a human antigen.

[0154] In some embodiments, a binding moiety comprises a constant domain of an immunoglobulin, or a fragment or variant thereof. For example, in certain embodiments a binding moiety comprises a CH1, CH2, CH3, CH1CH3, CH2CH3, CH1CH2CH3, and/or CL domain of an immunoglobulin, including fragments and variants thereof, and combinations thereof. In some instances, the light chain (CL) is a lambda or kappa chain. In some embodiments, the constant domains present in binding moiety of an activatable proprotein homodimer provided herein is glycosylated. In some embodiments, the glycosylation is N-glycosylation. In some embodiments, the glycosylation is O-glycosylation.

[0155] In specific embodiments, a binding moiety comprises, in an N- to C-terminal orientation: (1) an antigen binding domain of an immunoglobulin, including antigen binding fragments and variants thereof; and (2) an immunoglobulin constant domain, including fragments and variants thereof, for example, a CH1, CH2, CH3, CH1CH3, CH2CH3, CH1CH2CH3, and/or CL domain of an immunoglobulin, including combinations thereof. In specific embodiments, a binding moiety comprises, consists, or consists essentially of a CH2CH3 domain of an immunoglobulin.

[0156] The immunoglobulin domains used herein (antigen binding domains, constant domains) optionally comprise IgG domains. However, certain embodiments comprise alternate immunoglobulins such as IgM, IgA, IgD, and IgE. Furthermore, all possible isotypes of the various immunoglobulins are also encompassed within the current embodiments. Thus, IgG1, IgG2, IgG3, etc., are all possible molecules in the binding domains. In addition to choice in selection of the type of immunoglobulin and isotype, certain embodiments comprise various hinge regions (or functional equivalents thereof). Such hinge regions provide flexibility between the different domains of the proproteins described herein. In some embodiments, the immunoglobulin portion of the binding domain (or larger masking moiety) is from an immunoglobulin class selected from IgG1, IgG2, IgG3, IgG4, IgD, IgA, and IgM.

[0157] Linkers. As noted above, in certain embodiments, each polypeptide comprises at least one or two linkers, or peptide linkers. In some embodiments, at least one of the linkers is a cleavable linker, for example, a cleavable linker that comprises a protease cleavage site. In some embodiments, at least one of the linkers is a non-cleavable linker, that is, a physiologically-stable linker.

[0158] In some embodiments, the first linker and/or the second linker are about 1-50 1-40, 1-30, 1-20, 1-10, 1-5, 1-4, 1-3 amino acids in length, or about 1, 2, 3, 4, 5, 6, 7, 8, 9, 10, 11, 12, 13, 14, 15, 16, 17, 18, 19, 20, 21, 22, 23, 24, 25, 26, 27, 28, 29, 30, 31, 32, 33, 34, 35, 36, 37, 38, 39, 40, 41, 42, 43, 44, 45, 46, 47, 48, 49, 50 amino acids in length. In particular embodiments, the first linker is a cleavable linker, and the second linker is a non-cleavable linker. In some embodiments, the first linker is a non-cleavable linker, and the second linker is a cleavable linker. In some embodiments, both linkers are cleavable linkers.

[0159] In some embodiments, a cleavable linker comprises at least one protease cleavage site. Suitable protease cleavages sites and self-cleaving peptides are known to the skilled person (see, e.g., Ryan et al., J. Gener. Virol. 78:699-722, 1997; and Scymczak et al., Nature Biotech. 5:589-594, 2004). In some embodiments, the protease cleavage site is cleavable by a protease selected from one or more of a metalloprotease, a serine protease, a cysteine protease, and an aspartic acid protease. In particular embodiments, the protease cleavage site is cleavable by a protease selected from one or more of MMP1, MMP2, MMP3, MMP4, MMP5, MMP6, MMP7, MMP8, MMP9, MMP10, MMP11, MMP12, MMP13, MMP14, TEV protease, matriptase, uPA, FAP, Legumain, PSA, Kallikrein, Cathepsin A, and Cathepsin B.

[0160] Examples of cleavable linkers are provided in Table S3 below.

TABLE S3
Exemplary cleavable linkers

| Name | Sequence | SEQ ID NO: |
|---|---|---|
| CTMX | GSLSGRSDNHGS | 56 |
| PS1 | LGGSGRSANA | 57 |
| PS2 | LSGRSANAG | 58 |
| PS3 | GPLGLAGRSANA | 59 |
| PS4 | PLGLSGRSANAGPA | 60 |
| PS5 | PLGLAGRSANAGPA | 61 |
| PS6 | GPLGLSGRSANAGPASG | 62 |
| PS7 | GPLGLAGRSANAGPASG | 63 |
| PS8 | SGPLGLAGRSANAGPAS | 64 |
| PS9 | SGPASGRSANAPLGLAG | 65 |
| PS10 | GPASGRSANAPLGLAGS | 66 |
| PS11 | GPLGLAGRSANPGPASG | 67 |
| PS12 | GPLGLAGRSDNHGPASG | 68 |
| PS13 | GPLGLAGRSDNPGPASG | 69 |
| PS14 | GPLGLAGRSENPGPASG | 70 |
| PS15 | GPLGLAGRSDNLGPASG | 71 |
| PS16 | GPLGLAGRNAQVGPASG | 72 |
| PS17 | LSGRSDNA | 73 |
| PS18 | LSGRSDND | 74 |
| PS19 | LSGRSDNE | 75 |
| PS20 | LSGRSDNF | 76 |
| PS21 | LSGRSDNG | 77 |
| PS22 | LSGRSDNI | 78 |
| PS23 | LSGRSDNK | 79 |
| PS24 | LSGRSDNL | 80 |
| PS25 | LSGRSDNM | 81 |
| PS26 | LSGRSDNN | 82 |
| PS27 | LSGRSDNP | 83 |
| PS28 | LSGRSDNQ | 84 |
| PS29 | LSGRSDNR | 85 |
| PS30 | LSGRSDNS | 86 |
| PS31 | LSGRSDNT | 87 |
| PS32 | LSGRSDNV | 88 |
| PS33 | LSGRSDNW | 89 |
| PS34 | LSGRSDNY | 90 |
| PS35 | LSGRSAND | 91 |
| PS36 | LSGRSANE | 92 |
| PS37 | LSGRSANF | 93 |
| PS38 | LSGRSANG | 94 |
| PS39 | LSGRSANE | 95 |
| PS40 | LSGRSANI | 96 |
| PS41 | LSGRSANK | 97 |
| PS42 | LSGRSANL | 98 |
| PS43 | LSGRSANM | 99 |
| PS44 | LSGRSANN | 100 |
| PS45 | LSGRSANP | 101 |
| PS46 | LSGRSANQ | 102 |
| PS47 | LSGRSANR | 103 |
| PS48 | LSGRSANS | 104 |
| PS49 | LSGRSANT | 105 |
| PS50 | LSGRSANV | 106 |
| PS51 | LSGRSANW | 107 |
| PS52 | LSGRSANY | 108 |
| PS12b | PLGLAGRSDNHS | 109 |
| PS53 | PLGLAGSGRSDNR | 110 |
| PS103 | PLGLAGSGRSDNRGA | 111 |
| PS104 | PLGLAGSGRSDNQGA | 112 |
| PS105 | PLGLAGSGRSDNYGA | 113 |
| PS106 | GPLGLAGSGRSDNQG | 114 |
| PS107 | PLGLAGSGRSDNQ | 179 |
| PS112 | PLGLAGSGRSDNR | 180 |
| PS118 | PLGLAGSGRSDNH | 181 |
| | PLGLAGSGRSDNT | 182 |
| | SGRSDNH | 183 |

[0161] Thus, in certain embodiment, a cleavable linker is selected from Table S3. Additional examples of cleavable linkers include an amino acid sequence cleaved by a serine protease such as thrombin, chymotrypsin, trypsin, elastase, kallikrein, or subtilisin. Illustrative examples of thrombin-cleavable amino acid sequences include, but are not limited to: -Gly-Arg-Gly-Asp-(SEQ ID NO:115), -Gly-Gly-Arg-, -Gly-Arg-Gly-Asp-Asn-Pro-(SEQ ID NO: 116), -Gly-Arg-Gly-Asp-Ser-(SEQ ID NO: 117), -Gly-Arg-Gly-Asp-Ser-Pro-Lys-(SEQ ID NO: 118), -Gly-Pro-Arg-, -Val-Pro-Arg-, and -Phe-Val-Arg-. Illustrative examples of elastase-cleavable amino acid sequences include, but are not limited to: -Ala-Ala-Ala-, -Ala-Ala-Pro-Val-(SEQ ID NO: 119), -Ala-Ala-Pro-Leu-(SEQ ID NO: 120), -Ala-Ala-Pro-Phe-(SEQ ID NO: 121), -Ala-Ala-Pro-Ala-(SEQ ID NO: 122), and -Ala-Tyr-Leu-Val-(SEQ ID NO: 123).

[0162] Cleavable linkers also include amino acid sequences that can be cleaved by a matrix metalloproteinase such as collagenase, stromelysin, and gelatinase. Illustrative examples of matrix metalloproteinase-cleavable amino acid sequences include, but are not limited to: -Gly-Pro-Y-Gly-Pro-Z-(SEQ ID NO: 124), -Gly-Pro-, Leu-Gly-Pro-Z-(SEQ ID NO: 125), -Gly-Pro-Ile-Gly-Pro-Z-(SEQ ID NO: 126), and -Ala-Pro-Gly-Leu-Z-(SEQ ID NO: 127), where Y and Z are amino acids. Illustrative examples of collagenase-cleavable amino acid sequences include, but are not limited to: -Pro-Leu-Gly-Pro-D-Arg-Z-(SEQ ID NO: 128), -Pro-Leu-Gly-Leu-Leu-Gly-Z-(SEQ ID NO: 129), -Pro-Gln-Gly-Ile-Ala-Gly-Trp-(SEQ ID NO: 130), -Pro-Leu-Gly-Cys(Me)-His-(SEQ ID NO: 131), -Pro-Leu-Gly-Leu-Tyr-Ala-(SEQ ID NO: 132), -Pro-Leu-Ala-Leu-Trp-Ala-Arg-(SEQ ID NO: 133), and -Pro-Leu-Ala-Tyr-Trp-Ala-Arg-(SEQ ID NO: 134), where Z is an amino acid. An illustrative example of a stromelysin-cleavable amino acid sequence is -Pro-Tyr-Ala-Tyr-Tyr-Met-Arg- (SEQ ID NO: 135); and an example of a gelatinase-cleavable amino acid sequence is -Pro-Leu-Gly-Met-Tyr-Ser-Arg-(SEQ ID NO: 136).

[0163] Cleavable linkers also include amino acid sequences that can be cleaved by an angiotensin converting enzyme, such as, for example, -Asp-Lys-Pro-, -Gly-Asp-Lys-Pro-(SEQ ID NO: 137), and -Gly-Ser-Asp-Lys-Pro-(SEQ ID NO: 138). Cleavable linkers also include amino acid sequences that can be degraded by cathepsin B, such as, for example, Val-Cit, Ala-Leu-Ala-Leu-(SEQ ID NO: 139), Gly-Phe-Leu-Gly-(SEQ ID NO: 140) and Phe-Lys.

[0164] In particular embodiments, a cleavable linker has a half life at pH 7.4, 25° C., for example, at physiological pH, human body temperature (e.g., in vivo, in serum, in a given tissue), of about or less than about 30 minutes, 1 hour, 2 hours, 3 hours, 4 hours, 5 hours, 6 hours, 12 hours, 18 hours, 24 hours, 36 hours, 48 hours, 72 hours, or 96 hours, or any intervening half-life.

[0165] Typically, at least one of the first or second linker is a non-cleavable linker. Exemplary non-cleavable linkers include those disclosed in Maratea et al., Gene 40:39-46, 1985; Murphy et al., PNAS USA. 83:8258-8262, 1986; U.S. Pat. Nos. 4,935,233 and 4,751,180. Particular non-cleavable linker sequences contain Gly, Ser, and/or Asn residues. Other near neutral amino acids, such as Thr and Ala may also be employed in the peptide linker sequence, if desired.

[0166] Certain exemplary non-cleavable linkers include Gly, Ser and/or Asn-containing linkers, as follows: [G]ₓ, [S]ₓ, [N]ₓ, [GS]ₓ, [GGS]ₓ, [GSS]ₓ, [GSGS]ₓ (SEQ ID NO: 141), [GGSG]ₓ (SEQ ID NO: 142), [GGGS]ₓ (SEQ ID NO: 143), [GGGGS]ₓ(SEQ ID NO: 144), [GN]ₓ, [GGN]ₓ, [GNN]ₓ, [GNGN]ₓ(SEQ ID NO: 145), [GGNG]ₓ (SEQ ID NO: 146), [GGGN]ₓ(SEQ ID NO: 147), [GGGGN]ₓ (SEQ ID NO: 148) linkers, where x is 1, 2, 3, 4, 5, 6, 7, 8, 9, 10, 11, 12, 13, 14, 15, 16, 17, 18, 19, or 20 or more. Other combinations of these and related amino acids will be apparent to persons skilled in the art.

[0167] Additional examples of non-cleavable linkers include the following amino acid sequences: Gly-Gly-Gly-Gly-Ser-Gly-Gly-Gly-Gly-Ser-Gly-Gly-Gly-Gly-Ser-(SEQ ID NO: 149); Gly-Ser-Gly-Gly-Gly-Gly-Ser-Gly-Gly-Gly-Gly-Ser-Gly-Gly-Gly-Gly-Ser-Gly-Gly-Gly-Gly-Ser-(SEQ ID NO: 150); Gly-Gly-Gly-Gly-Ser-Gly-Gly-Gly-Gly-Ser-Gly-Gly-Gly-Gly-Ser-Gly-Gly-Gly-Gly-Ser-Gly-Gly-Gly-Gly-Ser-Gly-Gly-Gly-Gly-Ser-(SEQ ID NO: 151); Asp-Ala-Ala-Ala-Lys-Glu-Ala-Ala-Ala-Lys-Asp-Ala-Ala-Ala-Arg-Glu-Ala-Ala-Ala-Arg-Asp-Ala-Ala-Ala-Lys-(SEQ ID NO: 152); and Asn-Val-Asp-His-Ly s-Pro-Ser-Asn-Thr-Lys-Val-Asp-Ly s-Arg-(SEQ ID NO: 153).

[0168] Further non-limiting examples of non-cleavable linkers include DGGGS (SEQ ID NO: 154); TGEKP (SEQ ID NO: 155) (see, e.g., Liu et al., PNAS. 94:5525-5530, 1997); GGRR (SEQ ID NO: 156) (Pomerantz et al. 1995); (GGGGS)ₙ (SEQ ID NO: 144) (Kim et al., PNAS. 93:1156-1160, 1996); EGKSSGSGSESKVD (SEQ ID NO: 157) (Chaudhary et al., PNAS. 87:1066-1070, 1990); KESGSVSSEQLAQFRSLD (SEQ ID NO: 158) (Bird et al., Science. 242:423-426, 1988), GGRRGGGS (SEQ ID NO: 159); LRQRDGERP (SEQ ID NO: 160); LRQKDGGGSERP (SEQ ID NO: 161); LRQKd(GGGS)₂ ERP (SEQ ID NO: 162). In specific embodiments, the linker comprises a Gly3 linker sequence, which includes three glycine residues. In particular embodiments, flexible linkers can be rationally designed using a computer program capable of modeling both DNA-binding sites and the peptides themselves (Desjarlais & Berg, PNAS. 90:2256-2260, 1993; and PNAS. 91:11099-11103, 1994) or by phage display methods.

[0169] In some embodiment, a linker comprises an immunoglobulin (Ig)/antibody hinge region or fragment thereof, for example, a hinge region obtained or derived from an IgG1 antibody. In some embodiments, the term Ig “hinge” region refers to a polypeptide comprising an amino acid sequence that shares sequence identity, or similarity, with a portion of a naturally-occurring Ig hinge region sequence, which optionally includes the cysteine residues at which the disulfide bonds link the two heavy chains of the immunoglobulin. Sequence similarity of the hinge region linkers of the present invention with naturally-occurring immunoglobulin hinge region amino acid sequences can range from at least 50% to about 75-80%, and typically greater than about 90%.

[0170] In some embodiments, the linker comprises a spacer element and a cleavable element so as to make the cleavable element more accessible to the enzyme responsible for cleavage.

[0171] It will be appreciated that any one or more of the foregoing linkers can be combined with any one or more of the binding moieties, IL-2 proteins, IL-2 binding proteins, and/or purification tags described herein, to form an activatable proprotein homodimer of the disclosure.

[0172] Affinity Purification Tags. In certain embodiments, the first and second polypeptides comprise at least one affinity purification tag. Exemplary affinity purification tags including a polyhistidine tag (optionally hexahistidine tag), a VSV-G tag (YTDIEMNRLGK; SEQ ID NO:163), a universal tag (HTTPHH; SEQ ID NO:164), a Strep-tag (WSHPQFEK; SEQ ID NO:165) or AWAHPQPGG; SEQ ID NO:166), an S-tag (KETAAAKFERQHMDS; SEQ ID NO:167), an 51-tag (NANNPDWDF; SEQ ID NO:168), a Phe-tag (composed, for example, of about 3, 4, 5, 6, 7, 8, 9, 10, 11, or 12 Phe residues), a Cys-tag (composed, for example, of about 3, 4, 5, 6, 7, 8, 9, 10, 11, or 12 Cys residues), an Asp-tag (composed, for example, of about 3, 4, 5, 6, 7, 8, 9, 10, 11, or 12 Asp residues), an Arg-tag (composed, for example, of about 3, 4, 5, 6, 7, 8, 9, 10, 11, or 12 Arg residues), a Myc epitope tag (CEQKLISEEDL, SEQ ID NO:169), a KT3 epitope tag (KPPTPPPEPET, SEQ ID NO:170), an HSV epitope tag (QPELAPED; SEQ ID NO:171), a histidine affinity tag (KDHLIHNVHKEFHAHAHNK; SEQ ID NO:172), a hemagglutinin (HA) tag, a FLAG epitope tag (DYKDDDK; SEQ ID NO:173), an E2 epitope tag (SSTSSDFRDR; SEQ ID NO:174), a V5-tag (GKPIPNPLLGLDST; SEQ ID NO:175), a T7-tag (MASMTGGQQMG; SEQ ID NO:176), an AU5 epitope tag (TDFYLK; SEQ ID NO:177), and an AU1 epitope tag (DTYRYI; SEQ ID NO:178).

[0173] Additional Domains. Certain activatable proproteins comprise one or more additional domains, for example, binding domains. In some embodiments, each of polypeptides in an activatable proprotein further comprise a protein domain A at one free terminus and/or a protein domain B at the other free terminus.

[0174] In some embodiments, the protein domains A and B are the same or different. In particular embodiments, the protein domains A and B are selected from one or more of cell receptor targeting moieties optionally bi-specific targeting moieties, antigen binding domains optionally bi-specific antigen binding domains, cell membrane receptor extracellular domains (ECDs), Fc domains, human serum albumin (HSA), Fc binding domains, HSA binding domains, cytokines, chemokines, and soluble protein ligands

[0175] In some embodiments, the one or more additional protein domains can be used to form complexes of two, three, four, five, or more activatable proproteins, which are bound to together via the additional domain(s).

[0176] The structural outline of certain exemplary test constructs are provided in Table S4 below.

TABLE S4

| | | |
|---|---|---|
| | | SEQ ID |
| Name | Sequence | NO: |

IL-2 variant

| | | |
|---|---|---|
| P1988, | EPKSSDKTHTCPPCPAPELLGGPSVFLFPPKPKDTLMISRTPEVTCV | 184 |
| chains 1 and | VVDVSHEDPEVKFNWYVDGVEVHNAKTKPREEQYNSTYRVVSVLTVL | |
| 2: Fc- | HQDWLNGKEYKCKVSNKALPAPIEKTISKAKGQPREPQVYTLPPSRE | |
| stableLinker- | EMTKNQVSLTCLVKGFYPSDIAVEWESNGQPENNYKTTPPVLDSDGS | |
| IL-2_T3A | FFLYSKLTVDKSRWQQGNVFSCSVMHEALHNHYTQKSLSLSPGKGGG | |
| | GSGGGGSAPASSSTKKTQLQLEHLLLDLQMILNGINNYKNPKLTRML | |
| | TFKFYMPKKATELKHLQCLEEELKPLEEVLNLAQSKNFHLRPRDLIS | |
| | NINVIVLELKGSETTFMCEYADETATIVEFLNRWITFSQSIISTLT | |
| P2131, | EPKSSDKTHTCPPCPAPELLGGPSVFLFPPKPKDTLMISRTPEVTCV | 185 |
| chains 1 and | VVDVSHEDPEVKFNWYVDGVEVHNAKTKPREEQYNSTYRVVSVLTVL | |
| 2: Fc- | HQDWLNGKEYKCKVSNKALPAPIEKTISKAKGQPREPQVYTLPPSRE | |
| stableLinker- | EMTKNQVSLTCLVKGFYPSDIAVEWESNGQPENNYKTTPPVLDSDGS | |
| IL- | FFLYSKLTVDKSRWQQGNVFSCSVMHEALHNHYTQKSLSLSPGKGGG | |
| 2_R38E_T3A | GSGGGGSAPASSSTKKTQLQLEHLLLDLQMILNGINNYKNPKLTEML | |
| | TFKFYMPKKATELKHLQCLEEELKPLEEVLNLAQSKNFHLRPRDLIS | |
| | NINVIVLELKGSETTFMCEYADETATIVEFLNRWITFSQSIISTLT | |
| P2132, | EPKSSDKTHTCPPCPAPELLGGPSVFLFPPKPKDTLMISRTPEVTCV | 186 |
| chains 1 and | VVDVSHEDPEVKFNWYVDGVEVHNAKTKPREEQYNSTYRVVSVLTVL | |
| 2: Fc- | HQDWLNGKEYKCKVSNKALPAPIEKTISKAKGQPREPQVYTLPPSRE | |
| stableLinker- | EMTKNQVSLTCLVKGFYPSDIAVEWESNGQPENNYKTTPPVLDSDGS | |
| IL- | FFLYSKLTVDKSRWQQGNVFSCSVMHEALHNHYTQKSLSLSPGKGGG | |
| 2_E61K_T3A | GSGGGGSAPASSSTKKTQLQLEHLLLDLQMILNGINNYKNPKLTRML | |
| | TFKFYMPKKATELKHLQCLEKELKPLEEVLNLAQSKNFHLRPRDLIS | |
| | NINVIVLELKGSETTFMCEYADETATIVEFLNRWITFSQSIISTLT | |
| P2133, | EPKSSDKTHTCPPCPAPELLGGPSVFLFPPKPKDTLMISRTPEVTCV | 187 |
| chains 1 and | VVDVSHEDPEVKFNWYVDGVEVHNAKTKPREEQYNSTYRVVSVLTVL | |
| 2: Fc- | HQDWLNGKEYKCKVSNKALPAPIEKTISKAKGQPREPQVYTLPPSRE | |
| stableLinker- | EMTKNQVSLTCLVKGFYPSDIAVEWESNGQPENNYKTTPPVLDSDGS | |
| IL- | FFLYSKLTVDKSRWQQGNVFSCSVMHEALHNHYTQKSLSLSPGKGGG | |
| 2_E62K_T3A | GSGGGGSAPASSSTKKTQLQLEHLLLDLQMILNGINNYKNPKLTRML | |
| | TFKFYMPKKATELKHLQCLEEKLKPLEEVLNLAQSKNFHLRPRDLIS | |
| | NINVIVLELKGSETTFMCEYADETATIVEFLNRWITFSQSIISTLT | |
| P2134, | EPKSSDKTHTCPPCPAPELLGGPSVFLFPPKPKDTLMISRTPEVTCV | 188 |
| chains 1 and | VVDVSHEDPEVKFNWYVDGVEVHNAKTKPREEQYNSTYRVVSVLTVL | |
| 2: Fc- | HQDWLNGKEYKCKVSNKALPAPIEKTISKAKGQPREPQVYTLPPSRE | |
| stableLinker- | EMTKNQVSLTCLVKGFYPSDIAVEWESNGQPENNYKTTPPVLDSDGS | |
| IL- | FFLYSKLTVDKSRWQQGNVFSCSVMHEALHNHYTQKSLSLSPGKGGG | |
| 2_E61K_E62K_ | GSGGGGSAPASSSTKKTQLQLEHLLLDLQMILNGINNYKNPKLTRML | |
| T3A | TFKFYMPKKATELKHLQCLEKKLKPLEEVLNLAQSKNFHLRPRDLIS | |
| | NINVIVLELKGSETTFMCEYADETATIVEFLNRWITFSQSIISTLT | |
| P2135, | EPKSSDKTHTCPPCPAPELLGGPSVFLFPPKPKDTLMISRTPEVTCV | 189 |
| chains 1 and | VVDVSHEDPEVKFNWYVDGVEVHNAKTKPREEQYNSTYRVVSVLTVL | |
| 2: Fc- | HQDWLNGKEYKCKVSNKALPAPIEKTISKAKGQPREPQVYTLPPSRE | |
| stableLinker- | EMTKNQVSLTCLVKGFYPSDIAVEWESNGQPENNYKTTPPVLDSDGS | |
| IL- | FFLYSKLTVDKSRWQQGNVFSCSVMHEALHNHYTQKSLSLSPGKGGG | |
| 2_R38E_E61K_ | GSGGGGSAPASSSTKKTQLQLEHLLLDLQMILNGINNYKNPKLTEML | |
| E62K_T3A | TFKFYMPKKATELKHLQCLEKKLKPLEEVLNLAQSKNFHLRPRDLIS | |
| | NINVIVLELKGSETTFMCEYADETATIVEFLNRWITFSQSIISTLT | |
| P2136, | EPKSSDKTHTCPPCPAPELLGGPSVFLFPPKPKDTLMISRTPEVTCV | 190 |
| chains 1 and | VVDVSHEDPEVKFNWYVDGVEVHNAKTKPREEQYNSTYRVVSVLTVL | |
| 2: Fc- | HQDWLNGKEYKCKVSNKALPAPIEKTISKAKGQPREPQVYTLPPSRE | |
| stableLinker- | EMTKNQVSLTCLVKGFYPSDIAVEWESNGQPENNYKTTPPVLDSDGS | |
| IL- | FFLYSKLTVDKSRWQQGNVFSCSVMHEALHNHYTQKSLSLSPGKGGG | |
| 2_F42A_R38E_ | GSGGGGSAPASSSTKKTQLQLEHLLLDLQMILNGINNYKNPKLTEML | |
| T3A | TAKFYMPKKATELKHLQCLEEELKPLEEVLNLAQSKNFHLRPRDLIS | |
| | NINVIVLELKGSETTFMCEYADETATIVEFLNRWITFSQSIISTLT | |
| P2137, | EPKSSDKTHTCPPCPAPELLGGPSVFLFPPKPKDTLMISRTPEVTCV | 191 |
| chains 1 and | VVDVSHEDPEVKFNWYVDGVEVHNAKTKPREEQYNSTYRVVSVLTVL | |
| 2: Fc- | HQDWLNGKEYKCKVSNKALPAPIEKTISKAKGQPREPQVYTLPPSRE | |
| stableLinker- | EMTKNQVSLTCLVKGFYPSDIAVEWESNGQPENNYKTTPPVLDSDGS | |
| IL- | FFLYSKLTVDKSRWQQGNVFSCSVMHEALHNHYTQKSLSLSPGKGGG | |
| 2_F42A_E61K_ | GSGGGGSAPASSSTKKTQLQLEHLLLDLQMILNGINNYKNPKLTRML | |
| T3A | TAKFYMPKKATELKHLQCLEKELKPLEEVLNLAQSKNFHLRPRDLIS | |
| | NINVIVLELKGSETTFMCEYADETATIVEFLNRWITFSQSIISTLT | |
| P2138, | EPKSSDKTHTCPPCPAPELLGGPSVFLFPPKPKDTLMISRTPEVTCV | 192 |
| chains 1 and | VVDVSHEDPEVKFNWYVDGVEVHNAKTKPREEQYNSTYRVVSVLTVL | |
| 2: Fc- | HQDWLNGKEYKCKVSNKALPAPIEKTISKAKGQPREPQVYTLPPSRE | |
| stableLinker- | EMTKNQVSLTCLVKGFYPSDIAVEWESNGQPENNYKTTPPVLDSDGS | |
| IL- | FFLYSKLTVDKSRWQQGNVFSCSVMHEALHNHYTQKSLSLSPGKGGG | |
| 2_F42A_E62K_ | GSGGGGSAPASSSTKKTQLQLEHLLLDLQMILNGINNYKNPKLTRML | |
| T3A | TAKFYMPKKATELKHLQCLEEKLKPLEEVLNLAQSKNFHLRPRDLIS | |
| | NINVIVLELKGSETTFMCEYADETATIVEFLNRWITFSQSIISTLT | |
| P2139, | EPKSSDKTHTCPPCPAPELLGGPSVFLFPPKPKDTLMISRTPEVTCV | 193 |
| chains 1 and | VVDVSHEDPEVKFNWYVDGVEVHNAKTKPREEQYNSTYRVVSVLTVL | |
| 2: Fc- | HQDWLNGKEYKCKVSNKALPAPIEKTISKAKGQPREPQVYTLPPSRE | |
| stableLinker- | EMTKNQVSLTCLVKGFYPSDIAVEWESNGQPENNYKTTPPVLDSDGS | |
| IL- | FFLYSKLTVDKSRWQQGNVFSCSVMHEALHNHYTQKSLSLSPGKGGG | |
| 2_F42A_E61K_ | GSGGGGSAPASSSTKKTQLQLEHLLLDLQMILNGINNYKNPKLTRML | |
| E62K_T3A | TAKFYMPKKATELKHLQCLEKKLKPLEEVLNLAQSKNFHLRPRDLIS | |
| | NINVIVLELKGSETTFMCEYADETATIVEFLNRWITFSQSIISTLT | |
| P2140, | EPKSSDKTHTCPPCPAPELLGGPSVFLFPPKPKDTLMISRTPEVTCV | 194 |
| chains 1 and | VVDVSHEDPEVKFNWYVDGVEVHNAKTKPREEQYNSTYRVVSVLTVL | |
| 2: Fc- | HQDWLNGKEYKCKVSNKALPAPIEKTISKAKGQPREPQVYTLPPSRE | |
| stableLinker- | EMTKNQVSLTCLVKGFYPSDIAVEWESNGQPENNYKTTPPVLDSDGS | |
| IL- | FFLYSKLTVDKSRWQQGNVFSCSVMHEALHNHYTQKSLSLSPGKGGG | |
| 2_F42A_R38E_ | GSGGGGSAPASSSTKKTQLQLEHLLLDLQMILNGINNYKNPKLTEML | |
| E61K_E62K_ | TAKFYMPKKATELKHLQCLEKKLKPLEEVLNLAQSKNFHLRPRDLIS | |
| T3A | NINVIVLELKGSETTFMCEYADETATIVEFLNRWITFSQSIISTLT | |
| Fc_IL- | EPKSSDKTHTCPPCPAPELLGGPSVFLFPPKPKDTLMISRTPEVTCV | 195 |
| 2_R38D_T3A | VVDVSHEDPEVKFNWYVDGVEVHNAKTKPREEQYNSTYRVVSVLTVL | |
| | HQDWLNGKEYKCKVSNKALPAPIEKTISKAKGQPREPQVYTLPPSRE | |
| | EMTKNQVSLTCLVKGFYPSDIAVEWESNGQPENNYKTTPPVLDSDGS | |
| | FFLYSKLTVDKSRWQQGNVFSCSVMHEALHNHYTQKSLSLSPGKGGG | |
| | GSGGGGSAPASSSTKKTQLQLEHLLLDLQMILNGINNYKNPKLTDML | |
| | TFKFYMPKKATELKHLQCLEEELKPLEEVLNLAQSKNFHLRPRDLIS | |
| | NINVIVLELKGSETTFMCEYADETATIVEFLNRWITFSQSIISTLT | |
| Fc_IL- | EPKSSDKTHTCPPCPAPELLGGPSVFLFPPKPKDTLMISRTPEVTCV | 196 |
| 2_K43E_T3A | VVDVSHEDPEVKFNWYVDGVEVHNAKTKPREEQYNSTYRVVSVLTVL | |
| | HQDWLNGKEYKCKVSNKALPAPIEKTISKAKGQPREPQVYTLPPSRE | |
| | EMTKNQVSLTCLVKGFYPSDIAVEWESNGQPENNYKTTPPVLDSDGS | |
| | FFLYSKLTVDKSRWQQGNVFSCSVMHEALHNHYTQKSLSLSPGKGGG | |
| | GSGGGGSAPASSSTKKTQLQLEHLLLDLQMILNGINNYKNPKLTRML | |
| | TFEFYMPKKATELKHLQCLEEELKPLEEVLNLAQSKNFHLRPRDLIS | |
| | NINVIVLELKGSETTFMCEYADETATIVEFLNRWITFSQSIISTLT | |
| Fc_IL- | EPKSSDKTHTCPPCPAPELLGGPSVFLFPPKPKDTLMISRTPEVTCV | 197 |
| 2_E61R_T3A | VVDVSHEDPEVKFNWYVDGVEVHNAKTKPREEQYNSTYRVVSVLTVL | |
| | HQDWLNGKEYKCKVSNKALPAPIEKTISKAKGQPREPQVYTLPPSRE | |
| | EMTKNQVSLTCLVKGFYPSDIAVEWESNGQPENNYKTTPPVLDSDGS | |
| | FFLYSKLTVDKSRWQQGNVFSCSVMHEALHNHYTQKSLSLSPGKGGG | |
| | GSGGGGSAPASSSTKKTQLQLEHLLLDLQMILNGINNYKNPKLTRML | |
| | TFKFYMPKKATELKHLQCLERELKPLEEVLNLAQSKNFHLRPRDLIS | |
| | NINVIVLELKGSETTFMCEYADETATIVEFLNRWITFSQSIISTLT | |
| Fc_IL- | EPKSSDKTHTCPPCPAPELLGGPSVFLFPPKPKDTLMISRTPEVTCV | 198 |
| 2_E62R_T3A | VVDVSHEDPEVKFNWYVDGVEVHNAKTKPREEQYNSTYRVVSVLTVL | |
| | HQDWLNGKEYKCKVSNKALPAPIEKTISKAKGQPREPQVYTLPPSRE | |
| | EMTKNQVSLTCLVKGFYPSDIAVEWESNGQPENNYKTTPPVLDSDGS | |
| | FFLYSKLTVDKSRWQQGNVFSCSVMHEALHNHYTQKSLSLSPGKGGG | |
| | GSGGGGSAPASSSTKKTQLQLEHLLLDLQMILNGINNYKNPKLTRML | |
| | TFKFYMPKKATELKHLQCLEERLKPLEEVLNLAQSKNFHLRPRDLIS | |
| | NINVIVLELKGSETTFMCEYADETATIVEFLNRWITFSQSIISTLT | |
| Fc_IL- | EPKSSDKTHTCPPCPAPELLGGPSVFLFPPKPKDTLMISRTPEVTCV | 199 |
| 2_R38E_K43E_ | VVDVSHEDPEVKFNWYVDGVEVHNAKTKPREEQYNSTYRVVSVLTVL | |
| T3A | HQDWLNGKEYKCKVSNKALPAPIEKTISKAKGQPREPQVYTLPPSRE | |
| | EMTKNQVSLTCLVKGFYPSDIAVEWESNGQPENNYKTTPPVLDSDGS | |
| | FFLYSKLTVDKSRWQQGNVFSCSVMHEALHNHYTQKSLSLSPGKGGG | |
| | GSGGGGSAPASSSTKKTQLQLEHLLLDLQMILNGINNYKNPKLTEML | |
| | TFEFYMPKKATELKHLQCLEEELKPLEEVLNLAQSKNFHLRPRDLIS | |
| | NINVIVLELKGSETTFMCEYADETATIVEFLNRWITFSQSIISTLT | |
| Fc_IL- | EPKSSDKTHTCPPCPAPELLGGPSVFLFPPKPKDTLMISRTPEVTCV | 200 |
| 2_R38D K43E | VVDVSHEDPEVKFNWYVDGVEVHNAKTKPREEQYNSTYRVVSVLTVL | |
| T3A | HQDWLNGKEYKCKVSNKALPAPIEKTISKAKGQPREPQVYTLPPSRE | |
| | EMTKNQVSLTCLVKGFYPSDIAVEWESNGQPENNYKTTPPVLDSDGS | |
| | FFLYSKLTVDKSRWQQGNVFSCSVMHEALHNHYTQKSLSLSPGKGGG | |
| | GSGGGGSAPASSSTKKTQLQLEHLLLDLQMILNGINNYKNPKLTDML | |
| | TFEFYMPKKATELKHLQCLEEELKPLEEVLNLAQSKNFHLRPRDLIS | |
| | NINVIVLELKGSETTFMCEYADETATIVEFLNRWITFSQSIISTLT | |
| Fc_IL- | EPKSSDKTHTCPPCPAPELLGGPSVFLFPPKPKDTLMISRTPEVTCV | 201 |
| 2_R38E_E61K_ | VVDVSHEDPEVKFNWYVDGVEVHNAKTKPREEQYNSTYRVVSVLTVL | |
| T3A | HQDWLNGKEYKCKVSNKALPAPIEKTISKAKGQPREPQVYTLPPSRE | |
| | EMTKNQVSLTCLVKGFYPSDIAVEWESNGQPENNYKTTPPVLDSDGS | |
| | FFLYSKLTVDKSRWQQGNVFSCSVMHEALHNHYTQKSLSLSPGKGGG | |
| | GSGGGGSAPASSSTKKTQLQLEHLLLDLQMILNGINNYKNPKLTEML | |
| | TFKFYMPKKATELKHLQCLEKELKPLEEVLNLAQSKNFHLRPRDLIS | |
| | NINVIVLELKGSETTFMCEYADETATIVEFLNRWITFSQSIISTLT | |
| Fc_IL- | EPKSSDKTHTCPPCPAPELLGGPSVFLFPPKPKDTLMISRTPEVTCV | 202 |
| 2_R38D_E61K_ | VVDVSHEDPEVKFNWYVDGVEVHNAKTKPREEQYNSTYRVVSVLTVL | |
| T3A | HQDWLNGKEYKCKVSNKALPAPIEKTISKAKGQPREPQVYTLPPSRE | |
| | EMTKNQVSLTCLVKGFYPSDIAVEWESNGQPENNYKTTPPVLDSDGS | |
| | FFLYSKLTVDKSRWQQGNVFSCSVMHEALHNHYTQKSLSLSPGKGGG | |
| | GSGGGGSAPASSSTKKTQLQLEHLLLDLQMILNGINNYKNPKLTDML | |
| | TFKFYMPKKATELKHLQCLEKELKPLEEVLNLAQSKNFHLRPRDLIS | |
| | NINVIVLELKGSETTFMCEYADETATIVEFLNRWITFSQSIISTLT | |
| Fc_IL- | EPKSSDKTHTCPPCPAPELLGGPSVFLFPPKPKDTLMISRTPEVTCV | 203 |
| 2_K43E_E61K_ | VVDVSHEDPEVKFNWYVDGVEVHNAKTKPREEQYNSTYRVVSVLTVL | |
| T3A | HQDWLNGKEYKCKVSNKALPAPIEKTISKAKGQPREPQVYTLPPSRE | |
| | EMTKNQVSLTCLVKGFYPSDIAVEWESNGQPENNYKTTPPVLDSDGS | |
| | FFLYSKLTVDKSRWQQGNVFSCSVMHEALHNHYTQKSLSLSPGKGGG | |
| | GSGGGGSAPASSSTKKTQLQLEHLLLDLQMILNGINNYKNPKLTRML | |
| | TFEFYMPKKATELKHLQCLEKELKPLEEVLNLAQSKNFHLRPRDLIS | |
| | NINVIVLELKGSETTFMCEYADETATIVEFLNRWITFSQSIISTLT | |
| Fc_IL- | EPKSSDKTHTCPPCPAPELLGGPSVFLFPPKPKDTLMISRTPEVTCV | 204 |
| 2_R38D_K43E_ | VVDVSHEDPEVKFNWYVDGVEVHNAKTKPREEQYNSTYRVVSVLTVL | |
| E61K_T3A | HQDWLNGKEYKCKVSNKALPAPIEKTISKAKGQPREPQVYTLPPSRE | |
| | EMTKNQVSLTCLVKGFYPSDIAVEWESNGQPENNYKTTPPVLDSDGS | |
| | FFLYSKLTVDKSRWQQGNVFSCSVMHEALHNHYTQKSLSLSPGKGGG | |
| | GSGGGGSAPASSSTKKTQLQLEHLLLDLQMILNGINNYKNPKLTDML | |
| | TFEFYMPKKATELKHLQCLEKELKPLEEVLNLAQSKNFHLRPRDLIS | |
| | NINVIVLELKGSETTFMCEYADETATIVEFLNRWITFSQSIISTLT | |
| Fc_IL- | EPKSSDKTHTCPPCPAPELLGGPSVFLFPPKPKDTLMISRTPEVTCV | 205 |
| 2_R38D_F42A_ | VVDVSHEDPEVKFNWYVDGVEVHNAKTKPREEQYNSTYRVVSVLTVL | |
| K43E_T3A | HQDWLNGKEYKCKVSNKALPAPIEKTISKAKGQPREPQVYTLPPSRE | |
| | EMTKNQVSLTCLVKGFYPSDIAVEWESNGQPENNYKTTPPVLDSDGS | |
| | FFLYSKLTVDKSRWQQGNVFSCSVMHEALHNHYTQKSLSLSPGKGGG | |
| | GSGGGGSAPASSSTKKTQLQLEHLLLDLQMILNGINNYKNPKLTDML | |
| | TAEFYMPKKATELKHLQCLEEELKPLEEVLNLAQSKNFHLRPRDLIS | |
| | NINVIVLELKGSETTFMCEYADETATIVEFLNRWITFSQSIISTLT | |
| Fc_IL- | EPKSSDKTHTCPPCPAPELLGGPSVFLFPPKPKDTLMISRTPEVTCV | 206 |
| 2_F42A_K43E_ | VVDVSHEDPEVKFNWYVDGVEVHNAKTKPREEQYNSTYRVVSVLTVL | |
| E61K_T3A | HQDWLNGKEYKCKVSNKALPAPIEKTISKAKGQPREPQVYTLPPSRE | |
| | EMTKNQVSLTCLVKGFYPSDIAVEWESNGQPENNYKTTPPVLDSDGS | |
| | FFLYSKLTVDKSRWQQGNVFSCSVMHEALHNHYTQKSLSLSPGKGGG | |
| | GSGGGGSAPASSSTKKTQLQLEHLLLDLQMILNGINNYKNPKLTRML | |
| | TAEFYMPKKATELKHLQCLEKELKPLEEVLNLAQSKNFHLRPRDLIS | |
| | NINVIVLELKGSETTFMCEYADETATIVEFLNRWITFSQSIISTLT | |

IL-2Rα variant

| | | |
|---|---|---|
| P1992, His6- | HHHHHHGLNDIFEAQKIEWHEELCDDDPPEIPHATFKAMAYKEGTML | 207 |
| GLNDIFEAQKIE | NCECKRGFRRIKSGSLYMLCTGNSSHSSWDNQCQCTSSATRNTTKQV | |
| WHE-IL-2Rα | TPQPEEQKERKTTEMQSPMQPVDQASLPGHCREPPPWENEATERIYH | |
| | FWGQMVYYQCVQGYRALHRGPAESVCKMTHGKTRWTQPQLICTGE | |
| P1993, | ELCDDDPPEIPHATFKAMAYKEGTMLNCECKRGFRRIKSGSLYMLCT | 208 |
| chains 1 and | GNSSHSSWDNQCQCTSSATRNTTKQVTPQPEEQKERKTTEMQSPMQP | |
| 2: Fc- | VDQASLPGHCREPPPWENEATERIYHFVVGQMVYYQCVQGYRALHRG | |
| stableLinker- | PAESVCKMTHGKTRWTQPQLICTGEGGGGSGGGGSEPKSSDKTHTCP | |
| IL2Ra- | PCPAPELLGGPSVFLFPPKPKDTLMISRTPEVTCVVVDVSHEDPEVK | |
| GLNDIFEAQKIE | FNWYVDGVEVHNAKTKPREEQYNSTYRVVSVLTVLHQDWLNGKEYKC | |
| WHE-His6 | KVSNKALPAPIEKTISKAKGQPREPQVYTLPPSREEMTKNQVSLTCL | |
| | VKGFYPSDIAVEWESNGQPENNYKTTPPVLDSDGSFFLYSKLTVDKS | |
| | RWQQGNVFSCSVMHEALHNHYTQKSLSLSPGKGLNDIFEAQKIEWHE | |
| | HHHHHH | |
| P1996, His6- | HHHHHHGLNDIFEAQKIEWHEELCDDDPPEIPHATFKAMAYKEGTML | 209 |
| GLNDIFEAQKIE | NCECKRGFRRIKSGSLYMLCTGNSSHSSWDNQCQCTSSATRNTTKQV | |
| WHE-IL2Ra- | TPQPEEQKERKTTEMQSPMQPVDQASLPGHCREPPPWENEATERIYH | |
| full-ECD | FVVGQMVYYQCVQGYRALHRGPAESVCKMTHGKTRWTQPQLICTGEM | |
| | ETSQFPGEEKPQASPEGRPESETSCLVTTTDFQIQTEMAATMETSIF | |
| | TTE | |
| P1997, | ELCDDDPPEIPHATFKAMAYKEGTMLNCECKRGFRRIKSGSLYMLCT | 210 |
| chains 1 and | GNSSHSSWDNQCQCTSSATRNTTKQVTPQPEEQKERKTTEMQSPMQP | |
| 2: Fc- | VDQASLPGHCREPPPWENEATERIYHFVVGQMVYYQCVQGYRALHRG | |
| stableLinker | PAESVCKMTHGKTRWTQPQLICTGEMETSQFPGEEKPQASPEGRPES | |
| -IL2Rα-full- | ETSCLVTTTDFQIQTEMAATMETSIFTTEGGGGSGGGGSEPKSSDKT | |
| ECD- | HTCPPCPAPELLGGPSVFLFPPKPKDTLMISRTPEVTCVVVDVSHED | |
| GLNDIFEAQKIE | PEVKFNWYVDGVEVHNAKTKPREEQYNSTYRVVSVLTVLHQDWLNGK | |
| WHE-His6 | EYKCKVSNKALPAPIEKTISKAKGQPREPQVYTLPPSREEMTKNQVS | |
| | LTCLVKGFYPSDIAVEWESNGQPENNYKTTPPVLDSDGSFFLYSKLT | |
| | VDKSRWQQGNVFSCSVMHEALHNHYTQKSLSLSPGKGLNDIFEAQKI | |
| | EWHEHHHHHH | |
| P2141, His6- | HHHHHHGLNDIFEAQKIEWHEELCDDKPPEIPHATFKAMAYKEGTML | 211 |
| GLNDIFEAQKIE | NCECKRGFRRIKSGSLYMLCTGNSSHSSWDNQCQCTSSATRNTTKQV | |
| WHE-IL- | TPQPEEQKERKTTEMQSPMQPVDQASLPGHCREPPPWENEATERIYH | |
| 2Rα_D6K | FWGQMVYYQCVQGYRALHRGPAESVCKMTHGKTRWTQPQLICTGE | |
| P2142, His6- | HHHHHHGLNDIFEAQKIEWHEELCDDDPPEIPHATFKAMAYKEGTML | 212 |
| GLNDIFEAQKIE | NCECKRGFREIKSGSLYMLCTGNSSHSSWDNQCQCTSSATRNTTKQV | |
| WHE-IL- | TPQPEEQKERKTTEMQSPMQPVDQASLPGHCREPPPWENEATERIYH | |
| 2Rα_R36E | FWGQMVYYQCVQGYRALHRGPAESVCKMTHGKTRWTQPQLICTGE | |
| P2143, His6- | HHHHHHGLNDIFEAQKIEWHEELCDDDPPEIPHATFKAMAYKEGTML | 213 |
| GLNDIFEAQKIE | NCECKRGFRRIESGSLYMLCTGNSSHSSWDNQCQCTSSATRNTTKQV | |
| WHE-IL- | TPQPEEQKERKTTEMQSPMQPVDQASLPGHCREPPPWENEATERIYH | |
| 2Rα_K38E | FWGQMVYYQCVQGYRALHRGPAESVCKMTHGKTRWTQPQLICTGE | |
| P2144, His6- | HHHHHHGLNDIFEAQKIEWHEELCDDDPPEIPHATFKAMAYKEGTML | 214 |
| GLNDIFEAQKIE | NCECKRGFREIESGSLYMLCTGNSSHSSWDNQCQCTSSATRNTTKQV | |
| WHE-IL- | TPQPEEQKERKTTEMQSPMQPVDQASLPGHCREPPPWENEATERIYH | |
| 2Rα_R36E_K38E | FWGQMVYYQCVQGYRALHRGPAESVCKMTHGKTRWTQPQLICTGE | |
| P2145, His6- | HHHHHHGLNDIFEAQKIEWHEELCDDKPPEIPHATFKAMAYKEGTML | 215 |
| GLNDIFEAQKIE | NCECKRGFREIESGSLYMLCTGNSSHSSWDNQCQCTSSATRNTTKQV | |
| WHE-IL- | TPQPEEQKERKTTEMQSPMQPVDQASLPGHCREPPPWENEATERIYH | |
| 2Rα_D6K_R36E_ | FWGQMVYYQCVQGYRALHRGPAESVCKMTHGKTRWTQPQLICTGE | |
| K38E | | |
| His6-avi-IL- | HHHHHHGLNDIFEAQKIEWHEELCDDRPPEIPHATFKAMAYKEGTML | 216 |
| 2Rα_D6R | NCECKRGFRRIKSGSLYMLCTGNSSHSSWDNQCQCTSSATRNTTKQV | |
| | TPQPEEQKERKTTEMQSPMQPVDQASLPGHCREPPPWENEATERIYH | |
| | FWGQMVYYQCVQGYRALHRGPAESVCKMTHGKTRWTQPQLICTGE | |
| His6-avi-IL- | HHHHHHGLNDIFEAQKIEWHEELCDDRPPEIPHATFKAMAYKEGTML | 217 |
| 2Rα_E29K | NCKCKRGFRRIKSGSLYMLCTGNSSHSSWDNQCQCTSSATRNTTKQV | |
| | TPQPEEQKERKTTEMQSPMQPVDQASLPGHCREPPPWENEATERIYH | |
| | FWGQMVYYQCVQGYRALHRGPAESVCKMTHGKTRWTQPQLICTGE | |
| His6-avi-IL- | HHHHHHGLNDIFEAQKIEWHEELCDDDPPEIPHATFKAMAYKEGTML | 218 |
| 2Rα_K38D | NCECKRGFRRIDSGSLYMLCTGNSSHSSWDNQCQCTSSATRNTTKQV | |
| | TPQPEEQKERKTTEMQSPMQPVDQASLPGHCREPPPWENEATERIYH | |
| | FWGQMVYYQCVQGYRALHRGPAESVCKMTHGKTRWTQPQLICTGE | |
| His6-avi-IL- | HHHHHHGLNDIFEAQKIEWHEELCDDDPPEIPHATFKAMAYKEGTML | 219 |
| 2Rα_R36E | NCECKRGFREIKSGSLYMLCTGNSSHSSWDNQCQCTSSATRNTTKQV | |
| | TPQPEEQKERKTTEMQSPMQPVDQASLPGHCREPPPWENEATERIYH | |
| | FWGQMVYYQCVQGYRALHRGPAESVCKMTHGKTRWTQPQLICTGE | |
| His-avi-IL- | HHHHHHGLNDIFEAQKIEWHEELCDDDPPEIPHATFKAMAYKEGTML | 220 |
| 2Rα_R36D | NCECKRGFRDIKSGSLYMLCTGNSSHSSWDNQCQCTSSATRNTTKQV | |
| | TPQPEEQKERKTTEMQSPMQPVDQASLPGHCREPPPWENEATERIYH | |
| | FWGQMVYYQCVQGYRALHRGPAESVCKMTHGKTRWTQPQLICTGE | |
| His-avi-IL- | HHHHHHGLNDIFEAQKIEWHEELCDDKPPEIPHATFKAMAYKEGTML | 221 |
| 2Rα_D6K_E29K | NCKCKRGFRRIKSGSLYMLCTGNSSHSSWDNQCQCTSSATRNTTKQV | |
| | TPQPEEQKERKTTEMQSPMQPVDQASLPGHCREPPPWENEATERIYH | |
| | FWGQMVYYQCVQGYRALHRGPAESVCKMTHGKTRWTQPQLICTGE | |
| His-avi-IL- | HHHHHHGLNDIFEAQKIEWHEELCDDRPPEIPHATFKAMAYKEGTML | 222 |
| 2Rα_D6R_E29K | NCKCKRGFRRIKSGSLYMLCTGNSSHSSWDNQCQCTSSATRNTTKQV | |
| | TPQPEEQKERKTTEMQSPMQPVDQASLPGHCREPPPWENEATERIYH | |
| | FWGQMVYYQCVQGYRALHRGPAESVCKMTHGKTRWTQPQLICTGE | |
| His-avi-IL- | HHHHHHGLNDIFEAQKIEWHEELCDDDPPEIPHATFKAMAYKEGTML | 223 |
| 2Rα_E29K_K38E | NCKCKRGFRRIESGSLYMLCTGNSSHSSWDNQCQCTSSATRNTTKQV | |
| | TPQPEEQKERKTTEMQSPMQPVDQASLPGHCREPPPWENEATERIYH | |
| | FWGQMVYYQCVQGYRALHRGPAESVCKMTHGKTRWTQPQLICTGE | |
| His-avi-IL- | HHHHHHGLNDIFEAQKIEWHEELCDDRPPEIPHATFKAMAYKEGTML | 224 |
| 2Rα_D6R_E29K_ | NCKCKRGFRRIESGSLYMLCTGNSSHSSWDNQCQCTSSATRNTTKQV | |
| K38E | TPQPEEQKERKTTEMQSPMQPVDQASLPGHCREPPPWENEATERIYH | |
| | FVVGOMVYYQCVOGYRALHRGPAESVCKMTHGKTRWTOPQLICTGE | |

IL-2-variant-linker-IL-2Rc-variant

| | | |
|---|---|---|
| IL- | STKKTQLQLEHLLLDLQMILNGINNYKNPKLTEMLTFEFYMPKKATE | 225 |
| 2(R38E_K43E)- | LKHLQCLEEELKPLEEVLNLAQSKNFHLRPRDLISNINVIVLELKGS | |
| GGSGGSGRSDNQ | ETTFMCEYADETATIVEFLNRWITFSQSIISTLTGGSGGSGRSDN [symbol] G | |
| GGA-IL-2Rα | GAELCDDKPPEIPHATFKAMAYKEGTMLNCKCKRGFRRIKSGSLYML | |
| (D6K_E29K) | CTGNSSHSSWDNQCQCTSSATRNTTKQVTPQPEEQKERKTTEMQSPM | |
| | QPVDQASLPGHCREPPPWENEATERIYHFVVGQMVYYQCVQGYRALH | |
| | RGPAESVCKMTHGKTRWTQPQLICTGE | |
| IL- | STKKTQLQLEHLLLDLQMILNGINNYKNPKLTDMLTFEFYMPKKATE | 226 |
| 2(R38D_K43E)- | LKHLQCLEEELKPLEEVLNLAQSKNFHLRPRDLISNINVIVLELKGS | |
| GGSGGSGRSDNQ | ETTFMCEYADETATIVEFLNRWITFSQSIISTLTGGSGGSGRSDN [symbol] G | |
| GGA-IL-2Rα | GAELCDDRPPEIPHATFKAMAYKEGTMLNCKCKRGFRRIKSGSLYML | |
| (D6R_E29K) | CTGNSSHSSWDNQCQCTSSATRNTTKQVTPQPEEQKERKTTEMQSPM | |
| | QPVDQASLPGHCREPPPWENEATERIYHFVVGQMVYYQCVQGYRALH | |
| | RGPAESVCKMTHGKTRWTQPQLICTGE | |
| IL- | STKKTQLQLEHLLLDLQMILNGINNYKNPKLTEMLTFKFYMPKKATE | 227 |
| 2(R38E_E61K)- | LKHLQCLEKELKPLEEVLNLAQSKNFHLRPRDLISNINVIVLELKGS | |
| GGSGGSGRSDNQ | ETTFMCEYADETATIVEFLNRWITFSQSIISTLTGGSGGSGRSDN [symbol] G | |
| GGA-IL-2Rα | GAELCDDKPPEIPHATFKAMAYKEGTMLNCECKRGFRRIESGSLYML | |
| (D6K_K38E) | CTGNSSHSSWDNQCQCTSSATRNTTKQVTPQPEEQKERKTTEMQSPM | |
| | QPVDQASLPGHCREPPPWENEATERIYHFVVGQMVYYQCVQGYRALH | |
| | RGPAESVCKMTHGKTRWTQPQLICTGE | |
| IL- | STKKTQLQLEHLLLDLQMILNGINNYKNPKLTEMLTFEFYMPKKATE | 228 |
| 2(R38E_K43E_ | LKHLQCLEKELKPLEEVLNLAQSKNFHLRPRDLISNINVIVLELKGS | |
| E61K)- | ETTFMCEYADETATIVEFLNRWITFSQSIISTLTGGSGGSGRSDN [symbol] G | |
| GGSGGSGRSDNQ | GAELCDDKPPEIPHATFKAMAYKEGTMLNCKCKRGFRRIESGSLYML | |
| GGA-IL-2Rα | CTGNSSHSSWDNQCQCTSSATRNTTKQVTPQPEEQKERKTTEMQSPM | |
| (D6K_E29K_ | QPVDQASLPGHCREPPPWENEATERIYHFVVGQMVYYQCVQGYRALH | |
| K38E) | RGPAESVCKMTHGKTRWTQPQLICTGE | |

[0177] Thus, in certain embodiments, an activatable proprotein comprises a first polypeptide and a second polypeptide that comprises, consists, or consists essentially of at least one sequence that is at least 80, 85, 90, 95, 98, or 100% identical to a sequence selected from Table S4.

[0178] Exemplary activatable proproteins, and certain illustrative cleavage products, are provided in Table S5 below.

TABLE S5
Exemplary Activatable Proproteins

| | | |
|---|---|---|
| | | SEQ ID |
| Name | Sequence | NO: |

P22261450 Activatable Proprotein

| | | |
|---|---|---|
| Chains 1 | EVQLVQSGAEVKKPGESLKISCKGSGYTFTENIIHWVRQMPGKGLEWIG | 229 |
| and 2: | WFHPGSGSIKYNEKFKDQVTISADKSISTAYLQWSSLKASDTAMYFCAR | |
| 238_FAP- | HGGTGRGAMDYWGQGTLVTVSSASTKGPSVFPLAPSSKSTSGGTAALGC | |
| VH1- | LVKDYFPEPVTVSWNSGALTSGVHTFPAVLQSSGLYSLSSVVTVPSSSL | |
| huIgG1(AAA)_ | GTQTYICNVNHKPSNTKVDKKVEPKSCDKTHTCPPCPAPEAAGGPSVFL | |
| delK- | FPPKPKDTLMISRTPEVTCVVVDVSHEDPEVKFNWYVDGVEVHNAKTKP | |
| GGSPLGLAGGGS | REEQYNSTYRVVSVLTVLHQDWLNGKEYKCKVSNKALAAPIEKTISKAK | |
| GGS- | GQPREPQVYTLPPSRDELTKNQVSLTCLVKGFYPSDIAVEWESNGQPEN | |
| L_wt_del_ | NYKTTPPVLDSDGSFFLYSKLTVDKSRWQQGNVFSCSVMHEALHNHYTQ | |
| APASSS_R38E_ | KSLSLSPGGGSPLGLAGGGSGGSTKKTQLQLEHLLLDLQMILNGINNYK | |
| K43E- | NPKLTEMLTFEFYMPKKATELKHLQCLEEELKPLEEVLNLAQSKNFHLR | |
| GGSGGSGRSDN | PRDLISNINVIVLELKGSETTFMCEYADETATIVEFLNRWITFSQSIIS | |
| QGGA- | TLTGGSGGSGRSDN [symbol] GGAELCDDKPPEIPHATFKAMAYKEGTMLNCKCK | |
| R_D6K_E29K | RGFRRIKSGSLYMLCTGNSSHSSWDNQCQCTSSATRNTTKQVTPQPEEQ | |
| | KERKTTEMQSPMQPVDQASLPGHCREPPPWENEATERIYHFVVGQMVYY | |
| | QCVQGYRALHRGPAESVCKMTHGKTRWTQPQLICTGE | |
| Chains 3 | DIVMTQTPLSLSVTPGQPASISCRASKSVSTSAYSYMHWYLQKPGQSPQ | 230 |
| and 4: | LLIYLASNLESGVPDRFSGSGSGTDFTLKISRVEAEDVGVYYCQHSREL | |
| 7_FAP-L1- | PYTFGQGTKLEIKRTVAAPSVFIFPPSDEQLKSGTASVVCLLNNFYPRE | |
| huIgkLC | AKVQWKVDNALQSGNSQESVTEQDSKDSTYSLSSTLTLSKADYEKHKVY | |
| | ACEVTHQGLSSPVTKSFNRGEC | |

P22261450 Cleaved proteins (Complete MMP-2 cleavage)

| | | |
|---|---|---|
| Chains 1 | DIVMTQTPLSLSVTPGQPASISCRASKSVSTSAYSYMHWYLQKPGQSPQ | 231 |
| and 2: | LLIYLASNLESGVPDRFSGSGSGTDFTLKISRVEAEDVGVYYCQHSREL | |
| 7_FAP-L1- | PYTFGQGTKLEIKRTVAAPSVFIFPPSDEQLKSGTASVVCLLNNFYPRE | |
| huIgkLC | AKVQWKVDNALQSGNSQESVTEQDSKDSTYSLSSTLTLSKADYEKHKVY | |
| | ACEVTHQGLSSPVTKSFNRGEC | |
| Chains 3 | EVQLVQSGAEVKKPGESLKISCKGSGYTFTENIIHWVRQMPGKGLEWIG | 232 |
| and 4: | WFHPGSGSIKYNEKFKDQVTISADKSISTAYLQWSSLKASDTAMYFCAR | |
| FAP-VH1- | HGGTGRGAMDYWGQGTLVTVSSASTKGPSVFPLAPSSKSTSGGTAALGC | |
| huIgG1(AAA)_ | LVKDYFPEPVTVSWNSGALTSGVHTFPAVLQSSGLYSLSSVVTVPSSSL | |
| delK- | GTQTYICNVNHKPSNTKVDKKVEPKSCDKTHTCPPCPAPEAAGGPSVFL | |
| GGSPLG | FPPKPKDTLMISRTPEVTCVVVDVSHEDPEVKFNWYVDGVEVHNAKTKP | |
| | REEQYNSTYRVVSVLTVLHQDWLNGKEYKCKVSNKALYAPIEKTISKAK | |
| | GQPREPQVYTLPPSRDELTKNQVSLTCLVKGFYPSDIAVEWESNGQPEN | |
| | NYKTTPPVLDSDGSFFLYSKLTVDKSRWQQGNVFSCSVMHEALHNHYTQ | |
| | KSLSLSPGGGSPLG | |
| Chains 5 | LAGGGSGGSTKKTQLQLEHLLLDLQMILNGINNYKNPKLTEMLTFEFYM | 233 |
| and 6: | PKKATELKHLQCLEEELKPLEEVLNLAQSKNFHLRPRDLISNINVIVLE | |
| LAGGGS GGS- | LKGSETTFMCEYADETATIVEFLNRWITFSOSIISTLTGGSGGSGRSDN | |
| L_wt_del_ | [symbol] GGAELCDDKPPEIPHATFKAMAYKEGTMLNCKCKRGFRRIKSGSLYML | |
| APASSS_R38E_ | CTGNSSHSSWDNQCQCTSSATRNTTKQVTPQPEEQKERKTTEMQSPMQP | |
| K43E- | VDQASLPGHCREPPPWENEATERIYHFWGQMVYYQCVQGYRALHRGPA | |
| GGSGGSGRSDN | ESVCKMTHGKTRWTQPQLICTGE | |
| QGGA- | | |
| R_D6K_E29K | | |

P22261450 Cleaved proteins (Partial MMP-2 cleavage)

| | | |
|---|---|---|
| Chains 1 | DIVMTQTPLSLSVTPGQPASISCRASKSVSTSAYSYMHWYLQKPGQSPQ | 234 |
| and 2: | LLIYLASNLESGVPDRFSGSGSGTDFTLKISRVEAEDVGVYYCQHSREL | |
| 7_FAP-L1- | PYTFGQGTKLEIKRTVAAPSVFIFPPSDEQLKSGTASVVCLLNNFYPRE | |
| huIgkLC | AKVQWKVDNALQSGNSQESVTEQDSKDSTYSLSSTLTLSKADYEKHKVY | |
| | ACEVTHQGLSSPVTKSFNRGEC | |
| Chain 3: | EVQLVQSGAEVKKPGESLKISCKGSGYTFTENIIHWVRQMPGKGLEWIG | 235 |
| FAP-VH1- | WFHPGSGSIKYNEKFKDQVTISADKSISTAYLQWSSLKASDTAMYFCAR | |
| huIgG1(AAA)_ | HGGTGRGAMDYWGQGTLVTVSSASTKGPSVFPLAPSSKSTSGGTAALGC | |
| delK- | LVKDYFPEPVTVSWNSGALTSGVHTFPAVLQSSGLYSLSSVVTVPSSSL | |
| GGSPLG | GTQTYICNVNHKPSNTKVDKKVEPKSCDKTHTCPPCPAPEAAGGPSVFL | |
| LAGGGS GGS- | FPPKPKDTLMISRTPEVTCVVVDVSHEDPEVKFNWYVDGVEVHNAKTKP | |
| L_wt_del_ | REEQYNSTYRVVSVLTVLHQDWLNGKEYKCKVSNKALAAPIEKTISKAK | |
| APASSS_R38E_ | GQPREPQVYTLPPSRDELTKNQVSLTCLVKGFYPSDIAVEWESNGQPEN | |
| K43E- | NYKTTPPVLDSDGSFFLYSKLTVDKSRWQQGNVFSCSVMHEALHNHYTQ | |
| GGSGGSGRSDN | KSLSLSPGGGSPLGLAGGGSGGSTKKTQLQLEHLLLDLQMILNGINNYK | |
| QGGA- | NPKLTEMLTFEFYMPKKATELKHLQCLEEELKPLEEVLNLAQSKNFHLR | |
| R_D6K_E29K | PRDLISNINVIVLELKGSETTFMCEYADETATIVEFLNRWITFSQSIIS | |
| | TLTGGSGGSGRSDN [symbol] GGAELCDDKPPEIPHATFKAMAYKEGTMLNCKCK | |
| | RGFRRIKSGSLYMLCTGNSSHSSWDNQCQCTSSATRNTTKQVTPQPEEQ | |
| | KERKTTEMQSPMQPVDQASLPGHCREPPPWENEATERIYHFVVGQMVYY | |
| | QCVQGYRALHRGPAESVCKMTHGKTRWTQPQLICTGE | |
| Chain 4: | EVQLVQSGAEVKKPGESLKISCKGSGYTFTENIIHWVRQMPGKGLEWIG | 236 |
| FAP-VH1- | WFHPGSGSIKYNEKFKDQVTISADKSISTAYLQWSSLKASDTAMYFCAR | |
| huIgG1(AAA)_ | HGGTGRGAMDYWGQGTLVTVSSASTKGPSVFPLAPSSKSTSGGTAALGC | |
| delK- | LVKDYFPEPVTVSWNSGALTSGVHTFPAVLQSSGLYSLSSVVTVPSSSL | |
| GGSPLG | GTQTYICNVNHKPSNTKVDKKVEPKSCDKTHTCPPCPAPEAAGGPSVFL | |
| | FPPKPKDTLMISRTPEVTCVVVDVSHEDPEVKFNWYVDGVEVHNAKTKP | |
| | REEQYNSTYRVVSVLTVLHQDWLNGKEYKCKVSNKALAAPIEKTISKAK | |
| | GQPREPQVYTLPPSRDELTKNQVSLTCLVKGFYPSDIAVEWESNGQPEN | |
| | NYKTTPPVLDSDGSFFLYSKLTVDKSRWQQGNVFSCSVMHEALHNHYTQ | |
| | KSLSLSPGGGSPLG | |
| Chain 5: | LAGGGSGGSTKKTQLQLEHLLLDLQMILNGINNYKNPKLTEMLTFEFYM | 237 |
| LAGGGS GGS- | PKKATELKHLQCLEEELKPLEEVLNLAQSKNFHLRPRDLISNINVIVLE | |
| L_wt_del_ | LKGSETTFMCEYADETATIVEFLNRWITFSQSIISTLTGGSGGSGRSDN | |
| APASSS_R38E_ | [symbol] GGAELCDDKPPEIPHATFKAMAYKEGTMLNCKCKRGFRRIKSGSLYML | |
| K43E- | CTGNSSHSSWDNQCQCTSSATRNTTKQVTPQPEEQKERKTTEMQSPMQP | |
| GGSGGSGRSDN | VDQASLPGHCREPPPWENEATERIYHFWGQMVYYQCVQGYRALHRGPA | |
| QGGA- | ESVCKMTHGKTRWTQPQLICTGE | |
| R_D6K_E29K | | |

P22261450 Cleaved proteins (Complete uPA cleavage)

| | | |
|---|---|---|
| Chains 1 | DIVMTQTPLSLSVTPGQPASISCRASKSVSTSAYSYMHWYLQKPGQSPQ | 238 |
| and 2: | LLIYLASNLESGVPDRFSGSGSGTDFTLKISRVEAEDVGVYYCQHSREL | |
| 7_FAP-L1- | PYTFGQGTKLEIKRTVAAPSVFIFPPSDEQLKSGTASVVCLLNNFYPRE | |
| huIgkLC | AKVQWKVDNALQSGNSQESVTEQDSKDSTYSLSSTLTLSKADYEKHKVY | |
| | ACEVTHQGLSSPVTKSFNRGEC | |
| Chains 3 | EVQLVQSGAEVKKPGESLKISCKGSGYTFTENIIHWVRQMPGKGLEWIG | 239 |
| and 4: | WFHPGSGSIKYNEKFKDQVTISADKSISTAYLQWSSLKASDTAMYFCAR | |
| FAP-VH1- | HGGTGRGAMDYWGQGTLVTVSSASTKGPSVFPLAPSSKSTSGGTAALGC | |
| huIgG1(AAA)_ | LVKDYFPEPVTVSWNSGALTSGVHTFPAVLQSSGLYSLSSVVTVPSSSL | |
| delK- | GTQTYICNVNHKPSNTKVDKKVEPKSCDKTHTCPPCPAPEAAGGPSVFL | |
| GGSPLGLAGGGS | FPPKPKDTLMISRTPEVTCVVVDVSHEDPEVKFNWYVDGVEVHNAKTKP | |
| GGS- | REEQYNSTYRVVSVLTVLHQDWLNGKEYKCKVSNKALYAPIEKTISKAK | |
| L_wt_del_ | GQPREPQVYTLPPSRDELTKNQVSLTCLVKGFYPSDIAVEWESNGQPEN | |
| APASSS_R38E_ | NYKTTPPVLDSDGSFFLYSKLTVDKSRWQQGNVFSCSVMHEALHNHYTQ | |
| K43E- | KSLSLSPGGGSPLGLAGGGSGGSTKKTQLQLEHLLLDLQMILNGINNYK | |
| GGSGGSGR | NPKLTEMLTFEFYMPKKATELKHLQCLEEELKPLEEVLNLAQSKNFHLR | |
| | PRDLISNINVIVLELKGSETTFMCEYADETATIVEFLNRWITFSQSIIS | |
| | TLTGGSGGSGR | |
| Chains 5 | SDN [symbol] GGAELCDDKPPEIPHATFKAMAYKEGTMLNCKCKRGFRRIKSGSL | 240 |
| and 6: | YMLCTGNSSHSSWDNQCQCTSSATRNTTKQVTPQPEEQKERKTTEMQSP | |
| SDNQGGA- | MQPVDQASLPGHCREPPPWENEATERIYHFWGQMVYYQCVQGYRALHR | |
| R_D6K_E29K | GPAESVCKMTHGKTRWTQPQLICTGE | |

P22261450 Cleaved proteins (Partial uPA cleavage)

| | | |
|---|---|---|
| Chains 1 | DIVMTQTPLSLSVTPGQPASISCRASKSVSTSAYSYMHWYLQKPGQSPQ | 241 |
| and 2: | LLIYLASNLESGVPDRFSGSGSGTDFTLKISRVEAEDVGVYYCQHSREL | |
| 7_FAP-L1- | PYTFGQGTKLEIKRTVAAPSVFIFPPSDEQLKSGTASVVCLLNNFYPRE | |
| huIgkLC | AKVQWKVDNALQSGNSQESVTEQDSKDSTYSLSSTLTLSKADYEKHKVY | |
| | ACEVTHQGLSSPVTKSFNRGEC | |
| Chain 3: | EVQLVQSGAEVKKPGESLKISCKGSGYTFTENIIHWVRQMPGKGLEWIG | 242 |
| FAP-VH1- | WFHPGSGSIKYNEKFKDQVTISADKSISTAYLQWSSLKASDTAMYFCAR | |
| hulgG1(AAA)_ | HGGTGRGAMDYWGQGTLVTVSSASTKGPSVFPLAPSSKSTSGGTAALGC | |
| delK- | LVKDYFPEPVTVSWNSGALTSGVHTFPAVLQSSGLYSLSSVVTVPSSSL | |
| GGSPLG | GTQTYICNVNHKPSNTKVDKKVEPKSCDKTHTCPPCPAPEAAGGPSVFL | |
| LAGGGS GGS- | FPPKPKDTLMISRTPEVTCVVVDVSHEDPEVKFNWYVDGVEVHNAKTKP | |
| L_wt_del_ | REEQYNSTYRVVSVLTVLHQDWLNGKEYKCKVSNKALAAPIEKTISKAK | |
| APASSSREK | GQPREPQVYTLPPSRDELTKNQVSLTCLVKGFYPSDIAVEWESNGQPEN | |
| 43E- | NYKTTPPVLDSDGSFFLYSKLTVDKSRWQQGNVFSCSVMHEALHNHYTQ | |
| GGSGGSGRSDN | KSLSLSPGGGSPLGLAGGGSGGSTKKTQLQLEHLLLDLQMILNGINNYK | |
| QGGA- | NPKLTEMLTFEFYMPKKATELKHLQCLEEELKPLEEVLNLAQSKNFHLR | |
| R_D6K_E29K | PRDLISNINVIVLELKGSETTFMCEYADETATIVEFLNRWITFSQSIIS | |
| | TLTGGSGGSGRSDN [symbol] GGAELCDDKPPEIPHATFKAMAYKEGTMLNCKCK | |
| | RGFRRIKSGSLYMLCTGNSSHSSWDNQCQCTSSATRNTTKQVTPQPEEQ | |
| | KERKTTEMQSPMQPVDQASLPGHCREPPPWENEATERIYHFVVGQMVYY | |
| | QCVQGYRALHRGPAESVCKMTHGKTRWTQPQLICTGE | |
| Chain 4: | EVQLVQSGAEVKKPGESLKISCKGSGYTFTENIIHWVRQMPGKGLEWIG | 243 |
| FAP-VH1- | WFHPGSGSIKYNEKFKDQVTISADKSISTAYLQWSSLKASDTAMYFCAR | |
| hulgG1(AAA)_ | HGGTGRGAMDYWGQGTLVTVSSASTKGPSVFPLAPSSKSTSGGTAALGC | |
| delK- | LVKDYFPEPVTVSWNSGALTSGVHTFPAVLQSSGLYSLSSVVTVPSSSL | |
| GGSPLGLAGGGS | GTQTYICNVNHKPSNTKVDKKVEPKSCDKTHTCPPCPAPEAAGGPSVFL | |
| GGS- | FPPKPKDTLMISRTPEVTCVVVDVSHEDPEVKFNWYVDGVEVHNAKTKP | |
| L_wt_del_ | REEQYNSTYRVVSVLTVLHQDWLNGKEYKCKVSNKALAAPIEKTISKAK | |
| APASSS_R38E_ | GQPREPQVYTLPPSRDELTKNQVSLTCLVKGFYPSDIAVEWESNGQPEN | |
| K43E- | NYKTTPPVLDSDGSFFLYSKLTVDKSRWQQGNVFSCSVMHEALHNHYTQ | |
| GGSGGSGR | KSLSLSPGGGSPLGLAGGGSGGSTKKTQLQLEHLLLDLQMILNGINNYK | |
| | NPKLTEMLTFEFYMPKKATELKHLQCLEEELKPLEEVLNLAQSKNFHLR | |
| | PRDLISNINVIVLELKGSETTFMCEYADETATIVEFLNRWITFSQSIIS | |
| | TLTGGSGGSGR | |
| Chain 5: | SDN [symbol] GGAELCDDKPPEIPHATFKAMAYKEGTMLNCKCKRGFRRIKSGSL | 244 |
| SDNQGGA- | YMLCTGNSSHSSWDNQCQCTSSATRNTTKQVTPQPEEQKERKTTEMQSP | |
| R_D6K_E29K | MQPVDQASLPGHCREPPPWENEATERIYHFVVGQMVYYQCVQGYRALHR | |
| | GPAESVCKMTHGKTRWTQPQLICTGE | |

P22261450 Cleaved proteins (Complete MMP-2 and uPA cleavage)

| | | |
|---|---|---|
| Chains 1 | DIVMTQTPLSLSVTPGQPASISCRASKSVSTSAYSYMHWYLQKPGQSPQ | 245 |
| and 2: | LLIYLASNLESGVPDRFSGSGSGTDFTLKISRVEAEDVGVYYCQHSREL | |
| 7_FAP-L1- | PYTFGQGTKLEIKRTVAAPSVFIFPPSDEQLKSGTASVVCLLNNFYPRE | |
| huIgkLC | AKVQWKVDNALQSGNSQESVTEQDSKDSTYSLSSTLTLSKADYEKHKVY | |
| | ACEVTHQGLSSPVTKSFNRGEC | |
| Chains 3 | EVQLVQSGAEVKKPGESLKISCKGSGYTFTENIIHWVRQMPGKGLEWIG | 246 |
| and 4: | WFHPGSGSIKYNEKFKDQVTISADKSISTAYLQWSSLKASDTAMYFCAR | |
| FAP-VH1- | HGGTGRGAMDYWGQGTLVTVSSASTKGPSVFPLAPSSKSTSGGTAALGC | |
| huIgG1(AAA)_ | LVKDYFPEPVTVSWNSGALTSGVHTFPAVLQSSGLYSLSSVVTVPSSSL | |
| delK- | GTQTYICNVNHKPSNTKVDKKVEPKSCDKTHTCPPCPAPEAAGGPSVFL | |
| GGSPLG | FPPKPKDTLMISRTPEVTCVVVDVSHEDPEVKFNWYVDGVEVHNAKTKP | |
| | REEQYNSTYRVVSVLTVLHQDWLNGKEYKCKVSNKALAAPIEKTISKAK | |
| | GQPREPQVYTLPPSRDELTKNQVSLTCLVKGFYPSDIAVEWESNGQPEN | |
| | NYKTTPPVLDSDGSFFLYSKLTVDKSRWQQGNVFSCSVMHEALHNHYTQ | |
| | KSLSLSPGGGSPLG | |
| Chains 5 | LAGGGSGGSTKKTQLQLEHLLLDLQMILNGINNYKNPKLTEMLTFEFYM | 247 |
| and 6: | PKKATELKHLQCLEEELKPLEEVLNLAQSKNFHLRPRDLISNINVIVLE | |
| LAGGGS GGS- | LKGSETTFMCEYADETATIVEFLNRWITFSOSIISTLTGGSGGSGR | |
| L_wt_del_ | | |
| APASSS_R38E_ | | |
| K43E- | | |
| GGSGGSGRSDN | | |
| QGGA- | | |
| R_D6K_E29K | | |
| Chains 7 | SDN [symbol] GGAELCDDKPPEIPHATFKAMAYKEGTMLNCKCKRGFRRIKSGSL | 248 |
| and 8: | YMLCTGNSSHSSWDNQCQCTSSATRNTTKQVTPQPEEQKERKTTEMQSP | |
| SDNQGGA- | MQPVDQASLPGHCREPPPWENEATERIYHFVVGQMVYYQCVQGYRALHR | |
| R_D6K_E29K | GPAESVCKMTHGKTRWTQPQLICTGE | |

P22261450 Cleaved proteins (Complete MMP-2, Partial uPA cleavage)

| | | |
|---|---|---|
| Chains 1 | DIVMTQTPLSLSVTPGQPASISCRASKSVSTSAYSYMHWYLQKPGQSPQ | 249 |
| and 2: | LLIYLASNLESGVPDRFSGSGSGTDFTLKISRVEAEDVGVYYCQHSREL | |
| 7_FAP-L1- | PYTFGQGTKLEIKRTVAAPSVFIFPPSDEQLKSGTASVVCLLNNFYPRE | |
| huIgkLC | AKVQWKVDNALQSGNSQESVTEQDSKDSTYSLSSTLTLSKADYEKHKVY | |
| | ACEVTHQGLSSPVTKSFNRGEC | |
| Chains 3 | EVQLVQSGAEVKKPGESLKISCKGSGYTFTENIIHWVRQMPGKGLEWIG | 250 |
| and 4: | WFHPGSGSIKYNEKFKDQVTISADKSISTAYLQWSSLKASDTAMYFCAR | |
| FAP-VH1- | HGGTGRGAMDYWGQGTLVTVSSASTKGPSVFPLAPSSKSTSGGTAALGC | |
| huIgG1(AAA)_ | LVKDYFPEPVTVSWNSGALTSGVHTFPAVLQSSGLYSLSSVVTVPSSSL | |
| delK- | GTQTYICNVNHKPSNTKVDKKVEPKSCDKTHTCPPCPAPEAAGGPSVFL | |
| GGSPLG | FPPKPKDTLMISRTPEVTCVVVDVSHEDPEVKFNWYVDGVEVHNAKTKP | |
| | REEQYNSTYRVVSVLTVLHQDWLNGKEYKCKVSNKALAAPIEKTISKAK | |
| | GQPREPQVYTLPPSRDELTKNQVSLTCLVKGFYPSDIAVEWESNGQPEN | |
| | NYKTTPPVLDSDGSFFLYSKLTVDKSRWQQGNVFSCSVMHEALHNHYTQ | |
| | KSLSLSPGGGSPLG | |
| Chain 5: | LAGGGSGGSTKKTQLQLEHLLLDLQMILNGINNYKNPKLTEMLTFEFYM | 251 |
| LAGGGS GGS- | PKKATELKHLQCLEEELKPLEEVLNLAQSKNFHLRPRDLISNINVIVLE | |
| L_wt_del_ | LKGSETTFMCEYADETATIVEFLNRWITFSQSIISTLTGGSGGSGRSDN | |
| APASSS_R38E_ | [symbol] GGAELCDDKPPEIPHATFKAMAYKEGTMLNCKCKRGFRRIKSGSLYML | |
| K43E- | CTGNSSHSSWDNQCQCTSSATRNTTKQVTPQPEEQKERKTTEMQSPMQP | |
| GGSGGSGR | VDQASLPGHCREPPPWENEATERIYHFVVGQMVYYQCVQGYRALHRGPA | |
| SDNQGGA- | ESVCKMTHGKTRWTQPQLICTGE | |
| R_D6K_E29K | | |
| Chain 6: | LAGGGSGGSTKKTQLQLEHLLLDLQMILNGINNYKNPKLTEMLTFEFYM | 252 |
| LAGGGS GGS- | PKKATELKHLQCLEEELKPLEEVLNLAQSKNFHLRPRDLISNINVIVLE | |
| L_wt_del_ | LKGSETTFMCEYADETATIVEFLNRWITFSQSIISTLTGGSGGSGR | |
| APASSS_R38E_ | | |
| K43E- | | |
| GGSGGSGR | | |
| Chain 7: | SDN [symbol] GGAELCDDKPPEIPHATFKAMAYKEGTMLNCKCKRGFRRIKSGSL | 253 |
| SDNQGGA- | YMLCTGNSSHSSWDNQCQCTSSATRNTTKQVTPQPEEQKERKTTEMQSP | |
| R_D6K_E29K | MQPVDQASLPGHCREPPPWENEATERIYHFVVGQMVYYQCVQGYRALHR | |
| | GPAESVCKMTHGKTRWTQPQLICTGE | |

P22261450 Cleaved proteins (Complete uPA, Partial MMP-2 cleavage)

| | | |
|---|---|---|
| Chains 1 | DIVMTQTPLSLSVTPGQPASISCRASKSVSTSAYSYMHWYLQKPGQSPQ | 254 |
| and 2: | LLIYLASNLESGVPDRFSGSGSGTDFTLKISRVEAEDVGVYYCQHSREL | |
| 7_FAP-L1- | PYTFGQGTKLEIKRTVAAPSVFIFPPSDEQLKSGTASVVCLLNNFYPRE | |
| huIgkLC | AKVQWKVDNALQSGNSQESVTEQDSKDSTYSLSSTLTLSKADYEKHKVY | |
| | ACEVTHQGLSSPVTKSFNRGEC | |
| Chains 3 | SDN [symbol] GGAELCDDKPPEIPHATFKAMAYKEGTMLNCKCKRGFRRIKSGSL | 255 |
| and 4: | YMLCTGNSSHSSWDNQCQCTSSATRNTTKQVTPQPEEQKERKTTEMQSP | |
| SDNQGGA- | MQPVDQASLPGHCREPPPWENEATERIYHFVVGQMVYYQCVQGYRALHR | |
| R_D6K_E29K | GPAESVCKMTHGKTRWTQPQLICTGE | |
| Chain 5: | EVQLVQSGAEVKKPGESLKISCKGSGYTFTENIIHWVRQMPGKGLEWIG | 256 |
| FAP-VH1- | WFHPGSGSIKYNEKFKDQVTISADKSISTAYLQWSSLKASDTAMYFCAR | |
| huIgG1(AAA)_ | HGGTGRGAMDYWGQGTLVTVSSASTKGPSVFPLAPSSKSTSGGTAALGC | |
| delK- | LVKDYFPEPVTVSWNSGALTSGVHTFPAVLQSSGLYSLSSVVTVPSSSL | |
| GGSPLG | GTQTYICNVNHKPSNTKVDKKVEPKSCDKTHTCPPCPAPEAAGGPSVFL | |
| LAGGGS GGS- | FPPKPKDTLMISRTPEVTCVVVDVSHEDPEVKFNWYVDGVEVHNAKTKP | |
| L_wt_del_ | REEQYNSTYRVVSVLTVLHQDWLNGKEYKCKVSNKALYAPIEKTISKAK | |
| APASSS_R38E_ | GQPREPQVYTLPPSRDELTKNQVSLTCLVKGFYPSDIAVEWESNGQPEN | |
| K43E- | NYKTTPPVLDSDGSFFLYSKLTVDKSRWQQGNVFSCSVMHEALHNHYTQ | |
| GGSGGSGR | KSLSLSPGGGSPLGLAGGGSGGSTKKTQLQLEHLLLDLQMILNGINNYK | |
| | NPKLTEMLTFEFYMPKKATELKHLQCLEEELKPLEEVLNLAQSKNFHLR | |
| | PRDLISNINVIVLELKGSETTFMCEYADETATIVEFLNRWITFSQSIIS | |
| | TLTGGSGGSGR | |
| Chain 6: | EVQLVQSGAEVKKPGESLKISCKGSGYTFTENIIHWVRQMPGKGLEWIG | 257 |
| FAP-VH1- | WFHPGSGSIKYNEKFKDQVTISADKSISTAYLQWSSLKASDTAMYFCAR | |
| huIgG1(AAA)_ | HGGTGRGAMDYWGQGTLVTVSSASTKGPSVFPLAPSSKSTSGGTAALGC | |
| delK- | LVKDYFPEPVTVSWNSGALTSGVHTFPAVLQSSGLYSLSSVVTVPSSSL | |
| GGSPLG | GTQTYICNVNHKPSNTKVDKKVEPKSCDKTHTCPPCPAPEAAGGPSVFL | |
| | FPPKPKDTLMISRTPEVTCVVVDVSHEDPEVKFNWYVDGVEVHNAKTKP | |
| | REEQYNSTYRVVSVLTVLHQDWLNGKEYKCKVSNKALAAPIEKTISKAK | |
| | GQPREPQVYTLPPSRDELTKNQVSLTCLVKGFYPSDIAVEWESNGQPEN | |
| | NYKTTPPVLDSDGSFFLYSKLTVDKSRWQQGNVFSCSVMHEALHNHYTQ | |
| | KSLSLSPGGGSPLG | |
| Chain 7: | LAGGGSGGSTKKTQLQLEHLLLDLQMILNGINNYKNPKLTEMLTFEFYM | 258 |
| LAGGGS GGS- | PKKATELKHLQCLEEELKPLEEVLNLAQSKNFHLRPRDLISNINVIVLE | |
| L_wt_del_AP | LKGSETTFMCEYADETATIVEFLNRWITFSQSIISTLTGGSGGSGR | |
| ASSS_R38E_ | | |
| K43E- | | |
| GGSGGSGR | | |

P22261450 Cleaved proteins (Product-1 from partial uPA and partial MMP-2
cleavage)

| | | |
|---|---|---|
| Chains 1 | DIVMTQTPLSLSVTPGQPASISCRASKSVSTSAYSYMHWYLQKPGQSPQ | 259 |
| and 2: | LLIYLASNLESGVPDRFSGSGSGTDFTLKISRVEAEDVGVYYCQHSREL | |
| 7_FAP-L1- | PYTFGQGTKLEIKRTVAAPSVFIFPPSDEQLKSGTASVVCLLNNFYPRE | |
| huIgkLC | AKVQWKVDNALQSGNSQESVTEQDSKDSTYSLSSTLTLSKADYEKHKVY | |
| | ACEVTHQGLSSPVTKSFNRGEC | |
| Chain 3: | EVQLVQSGAEVKKPGESLKISCKGSGYTFTENIIHWVRQMPGKGLEWIG | 260 |
| FAP-VH1- | WFHPGSGSIKYNEKFKDQVTISADKSISTAYLQWSSLKASDTAMYFCAR | |
| huIgG1(AAA)_ | HGGTGRGAMDYWGQGTLVTVSSASTKGPSVFPLAPSSKSTSGGTAALGC | |
| delK- | LVKDYFPEPVTVSWNSGALTSGVHTFPAVLQSSGLYSLSSVVTVPSSSL | |
| GGSPLG | GTQTYICNVNHKPSNTKVDKKVEPKSCDKTHTCPPCPAPEAAGGPSVFL | |
| LAGGGS GGS- | FPPKPKDTLMISRTPEVTCVVVDVSHEDPEVKFNWYVDGVEVHNAKTKP | |
| L_wt_del_ | REEQYNSTYRVVSVLTVLHQDWLNGKEYKCKVSNKALAAPIEKTISKAK | |
| APASSS_R38E_ | GQPREPQVYTLPPSRDELTKNQVSLTCLVKGFYPSDIAVEWESNGQPEN | |
| K43E- | NYKTTPPVLDSDGSFFLYSKLTVDKSRWQQGNVFSCSVMHEALHNHYTQ | |
| GGSGGSGRSDN | KSLSLSPGGGSPLGLAGGGSGGSTKKTQLQLEHLLLDLQMILNGINNYK | |
| QGGA- | NPKLTEMLTFEFYMPKKATELKHLQCLEEELKPLEEVLNLAQSKNFHLR | |
| R_D6K_E29K | PRDLISNINVIVLELKGSETTFMCEYADETATIVEFLNRWITFSQSIIS | |
| | TLTGGSGGSGRSDN [symbol] GGAELCDDKPPEIPHATFKAMAYKEGTMLNCKCK | |
| | RGFRRIKSGSLYMLCTGNSSHSSWDNQCQCTSSATRNTTKQVTPQPEEQ | |
| | KERKTTEMQSPMQPVDQASLPGHCREPPPWENEATERIYHFVVGQMVYY | |
| | QCVQGYRALHRGPAESVCKMTHGKTRWTQPQLICTGE | |
| Chain 4: | EVQLVQSGAEVKKPGESLKISCKGSGYTFTENIIHWVRQMPGKGLEWIG | 261 |
| FAP-VH1- | WFHPGSGSIKYNEKFKDQVTISADKSISTAYLQWSSLKASDTAMYFCAR | |
| huIgGl (AAA) | HGGTGRGAMDYWGQGTLVTVSSASTKGPSVFPLAPSSKSTSGGTAALGC | |
| _delK- | LVKDYFPEPVTVSWNSGALTSGVHTFPAVLQSSGLYSLSSVVTVPSSSL | |
| GGSPLG | GTQTYICNVNHKPSNTKVDKKVEPKSCDKTHTCPPCPAPEAAGGPSVFL | |
| | FPPKPKDTLMISRTPEVTCVVVDVSHEDPEVKFNWYVDGVEVHNAKTKP | |
| | REEQYNSTYRVVSVLTVLHQDWLNGKEYKCKVSNKALAAPIEKTISKAK | |
| | GQPREPQVYTLPPSRDELTKNQVSLTCLVKGFYPSDIAVEWESNGQPEN | |
| | NYKTTPPVLDSDGSFFLYSKLTVDKSRWQQGNVFSCSVMHEALHNHYTQ | |
| | KSLSLSPGGGSPLG | |
| Chain 5: | LAGGGSGGSTKKTQLQLEHLLLDLQMILNGINNYKNPKLTEMLTFEFYM | 262 |
| LAGGGS GGS- | PKKATELKHLQCLEEELKPLEEVLNLAQSKNFHLRPRDLISNINVIVLE | |
| L_wt_del_ | LKGSETTFMCEYADETATIVEFLNRWITFSOSIISTLTGGSGGSGR | |
| APASSS_R38E_ | | |
| K43E- | | |
| GGSGGSGR | | |
| Chain 6: | SDN [symbol] GGAELCDDKPPEIPHATFKAMAYKEGTMLNCKCKRGFRRIKSGSL | 263 |
| SDNQGGA- | YMLCTGNSSHSSWDNQCQCTSSATRNTTKQVTPQPEEQKERKTTEMQSP | |
| R_D6K_E29K | MQPVDQASLPGHCREPPPWENEATERIYHFVVGQMVYYQCVQGYRALHR | |
| | GPAESVCKMTHGKTRWTQPQLICTGE | |

P22261450 Cleaved proteins (Product-2 from partial uPA and partial MMP-2
cleavage)

| | | |
|---|---|---|
| Chains 1 | DIVMTQTPLSLSVTPGQPASISCRASKSVSTSAYSYMHWYLQKPGQSPQ | 264 |
| and 2: | LLIYLASNLESGVPDRFSGSGSGTDFTLKISRVEAEDVGVYYCQHSREL | |
| 7_FAP-L1- | PYTFGQGTKLEIKRTVAAPSVFIFPPSDEQLKSGTASVVCLLNNFYPRE | |
| huIgkLC | AKVQWKVDNALQSGNSQESVTEQDSKDSTYSLSSTLTLSKADYEKHKVY | |
| | ACEVTHQGLSSPVTKSFNRGEC | |
| Chain 3: | EVQLVQSGAEVKKPGESLKISCKGSGYTFTENIIHWVRQMPGKGLEWIG | 265 |
| FAP-VH1- | WFHPGSGSIKYNEKFKDQVTISADKSISTAYLQWSSLKASDTAMYFCAR | |
| huIgG1(AAA)_ | HGGTGRGAMDYWGQGTLVTVSSASTKGPSVFPLAPSSKSTSGGTAALGC | |
| delK- | LVKDYFPEPVTVSWNSGALTSGVHTFPAVLQSSGLYSLSSVVTVPSSSL | |
| GGSPLG | GTQTYICNVNHKPSNTKVDKKVEPKSCDKTHTCPPCPAPEAAGGPSVFL | |
| LAGGGS GGS- | FPPKPKDTLMISRTPEVTCVVVDVSHEDPEVKFNWYVDGVEVHNAKTKP | |
| L_wt_del_ | REEQYNSTYRVVSVLTVLHQDWLNGKEYKCKVSNKALAAPIEKTISKAK | |
| APASSS_R38E_ | GQPREPQVYTLPPSRDELTKNQVSLTCLVKGFYPSDIAVEWESNGQPEN | |
| K43E- | NYKTTPPVLDSDGSFFLYSKLTVDKSRWQQGNVFSCSVMHEALHNHYTQ | |
| GGSGGSGR | KSLSLSPGGGSPLGLAGGGSGGSTKKTQLQLEHLLLDLQMILNGINNYK | |
| | NPKLTEMLTFEFYMPKKATELKHLQCLEEELKPLEEVLNLAQSKNFHLR | |
| | PRDLISNINVIVLELKGSETTFMCEYADETATIVEFLNRWITFSQSIIS | |
| | TLTGGSGGSGR | |
| Chain 4: | SDN [symbol] GGAELCDDKPPEIPHATFKAMAYKEGTMLNCKCKRGFRRIKSGSL | 266 |
| SDNQGGA- | YMLCTGNSSHSSWDNQCQCTSSATRNTTKQVTPQPEEQKERKTTEMQSP | |
| R_D6K_E29K | MQPVDQASLPGHCREPPPWENEATERIYHFVVGQMVYYQCVQGYRALHR | |
| | GPAESVCKMTHGKTRWTQPQLICTGE | |
| Chain 5: | EVQLVQSGAEVKKPGESLKISCKGSGYTFTENIIHWVRQMPGKGLEWIG | 267 |
| FAP-VH1- | WFHPGSGSIKYNEKFKDQVTISADKSISTAYLQWSSLKASDTAMYFCAR | |
| huIgG1(AAA)_ | HGGTGRGAMDYWGQGTLVTVSSASTKGPSVFPLAPSSKSTSGGTAALGC | |
| delK- | LVKDYFPEPVTVSWNSGALTSGVHTFPAVLQSSGLYSLSSVVTVPSSSL | |
| GGSPLG | GTQTYICNVNHKPSNTKVDKKVEPKSCDKTHTCPPCPAPEAAGGPSVFL | |
| | FPPKPKDTLMISRTPEVTCVVVDVSHEDPEVKFNWYVDGVEVHNAKTKP | |
| | REEQYNSTYRVVSVLTVLHQDWLNGKEYKCKVSNKALAAPIEKTISKAK | |
| | GQPREPQVYTLPPSRDELTKNQVSLTCLVKGFYPSDIAVEWESNGQPEN | |
| | NYKTTPPVLDSDGSFFLYSKLTVDKSRWQQGNVFSCSVMHEALHNHYTQ | |
| | KSLSLSPGGGSPLG | |
| Chain 6: | LAGGGSGGSTKKTQLQLEHLLLDLQMILNGINNYKNPKLTEMLTFEFYM | 268 |
| LAGGGS GGS- | PKKATELKHLQCLEEELKPLEEVLNLAQSKNFHLRPRDLISNINVIVLE | |
| L_wt_del_ | LKGSETTFMCEYADETATIVEFLNRWITFSOSIISTLTGGSGGSGRSDN | |
| APASSS_R38E_ | [symbol] GGAELCDDKPPEIPHATFKAMAYKEGTMLNCKCKRGFRRIKSGSLYML | |
| K43E- | CTGNSSHSSWDNQCQCTSSATRNTTKQVTPQPEEQKERKTTEMQSPMQP | |
| GGSGGSGR | VDQASLPGHCREPPPWENEATERIYHFVVGQMVYYQCVQGYRALHRGPA | |
| SDNQGGA- | ESVCKMTHGKTRWTQPQLICTGE | |
| R_D6K_E29K | | |

P22271450 Activatable Proprotein

| | | |
|---|---|---|
| Chains 1 | EVQLVQSGAEVKKPGESLKISCKGSGYTFTENIIHWVRQMPGKGLEWIG | 269 |
| and 2: | WFHPGSGSIKYNEKFKDQVTISADKSISTAYLQWSSLKASDTAMYFCAR | |
| 239_FAP- | HGGTGRGAMDYWGQGTLVTVSSASTKGPSVFPLAPSSKSTSGGTAALGC | |
| VH1- | LVKDYFPEPVTVSWNSGALTSGVHTFPAVLQSSGLYSLSSVVTVPSSSL | |
| huIgG1(AAA)_ | GTQTYICNVNHKPSNTKVDKKVEPKSCDKTHTCPPCPAPEAAGGPSVFL | |
| delK- | FPPKPKDTLMISRTPEVTCVVVDVSHEDPEVKFNWYVDGVEVHNAKTKP | |
| GGSPLGLAGGGS | REEQYNSTYRVVSVLTVLHQDWLNGKEYKCKVSNKALAAPIEKTISKAK | |
| GGS- | GQPREPQVYTLPPSRDELTKNQVSLTCLVKGFYPSDIAVEWESNGQPEN | |
| L_wt_del_ | NYKTTPPVLDSDGSFFLYSKLTVDKSRWQQGNVFSCSVMHEALHNHYTQ | |
| APASSS_R38E_ | KSLSLSPGGGSPLGLAGGGSGGSTKKTQLQLEHLLLDLQMILNGINNYK | |
| E61K- | NPKLTEMLTFKFYMPKKATELKHLQCLEKELKPLEEVLNLAQSKNFHLR | |
| GGSGGSGRSDN | PRDLISNINVIVLELKGSETTFMCEYADETATIVEFLNRWITFSQSIIS | |
| QGGA- | TLTGGSGGSGRSDN [symbol] GGAELCDDKPPEIPHATFKAMAYKEGTMLNCECK | |
| R_D6K_K38E | RGFRRIESGSLYMLCTGNSSHSSWDNQCQCTSSATRNTTKQVTPQPEEQ | |
| | KERKTTEMQSPMQPVDQASLPGHCREPPPWENEATERIYHFVVGQMVYY | |
| | QCVQGYRALHRGPAESVCKMTHGKTRWTQPQLICTGE | |
| Chains 3 | DIVMTQTPLSLSVTPGQPASISCRASKSVSTSAYSYMHWYLQKPGQSPQ | 270 |
| and 4: | LLIYLASNLESGVPDRFSGSGSGTDFTLKISRVEAEDVGVYYCQHSREL | |
| 7_FAP-L1- | PYTFGQGTKLEIKRTVAAPSVFIFPPSDEQLKSGTASWCLLNNFYPRE | |
| huIgkLC | AKVQWKVDNALQSGNSQESVTEQDSKDSTYSLSSTLTLSKADYEKHKVY | |
| | ACEVTHQGLSSPVTKSFNRGEC | |

P22281450 Activatable Proprotein

| | | |
|---|---|---|
| Chains 1 | EVQLVQSGAEVKKPGESLKISCKGSGYTFTENIIHWVRQMPGKGLEWIG | 271 |
| and 2: | WFHPGSGSIKYNEKFKDQVTISADKSISTAYLQWSSLKASDTAMYFCAR | |
| 240_FAP- | HGGTGRGAMDYWGQGTLVTVSSASTKGPSVFPLAPSSKSTSGGTAALGC | |
| VH1- | LVKDYFPEPVTVSWNSGALTSGVHTFPAVLQSSGLYSLSSVVTVPSSSL | |
| huIgG1(AAA)_ | GTQTYICNVNHKPSNTKVDKKVEPKSCDKTHTCPPCPAPEAAGGPSVFL | |
| delK- | FPPKPKDTLMISRTPEVTCVVVDVSHEDPEVKFNWYVDGVEVHNAKTKP | |
| GGSPLGLAGGGS | REEQYNSTYRVVSVLTVLHQDWLNGKEYKCKVSNKALAAPIEKTISKAK | |
| GGS- | GQPREPQVYTLPPSRDELTKNQVSLTCLVKGFYPSDIAVEWESNGQPEN | |
| L_wt_del_ | NYKTTPPVLDSDGSFFLYSKLTVDKSRWQQGNVFSCSVMHEALHNHYTQ | |
| APASSS_R38E_ | KSLSLSPGGGSPLGLAGGGSGGSTKKTQLQLEHLLLDLQMILNGINNYK | |
| E62K- | NPKLTEMLTFKFYMPKKATELKHLQCLEEKLKPLEEVLNLAQSKNFHLR | |
| GGSGGSGRSDN | PRDLISNINVIVLELKGSETTFMCEYADETATIVEFLNRWITFSQSIIS | |
| QGGA- | TLTGGSGGSGRSDN [symbol] GGAELCDDKPPEIPHATFKAMAYKEGTMLNCECK | |
| R_D6K_R36E | RGFREIKSGSLYMLCTGNSSHSSWDNQCQCTSSATRNTTKQVTPQPEEQ | |
| | KERKTTEMQSPMQPVDQASLPGHCREPPPWENEATERIYHFVVGQMVYY | |
| | QCVQGYRALHRGPAESVCKMTHGKTRWTQPQLICTGE | |
| Chains 3 | DIVMTQTPLSLSVTPGQPASISCRASKSVSTSAYSYMHWYLQKPGQSPQ | 272 |
| and 4: | LLIYLASNLESGVPDRFSGSGSGTDFTLKISRVEAEDVGVYYCQHSREL | |
| 7_FAP-L1- | PYTFGQGTKLEIKRTVAAPSVFIFPPSDEQLKSGTASWCLLNNFYPRE | |
| huIgkLC | AKVQWKVDNALQSGNSQESVTEQDSKDSTYSLSSTLTLSKADYEKHKVY | |
| | ACEVTHQGLSSPVTKSFNRGEC | |

P22291450 Activatable Proprotein

| | | |
|---|---|---|
| Chains 1 | EVQLVQSGAEVKKPGESLKISCKGSGYTFTENIIHWVRQMPGKGLEWIG | 273 |
| and 2: | WFHPGSGSIKYNEKFKDQVTISADKSISTAYLQWSSLKASDTAMYFCAR | |
| 241_FAP- | HGGTGRGAMDYWGQGTLVTVSSASTKGPSVFPLAPSSKSTSGGTAALGC | |
| VH1- | LVKDYFPEPVTVSWNSGALTSGVHTFPAVLQSSGLYSLSSVVTVPSSSL | |
| huIgG1(AAA)_ | GTQTYICNVNHKPSNTKVDKKVEPKSCDKTHTCPPCPAPEAAGGPSVFL | |
| delK- | FPPKPKDTLMISRTPEVTCVVVDVSHEDPEVKFNWYVDGVEVHNAKTKP | |
| GGSPLGLAGGGS | REEQYNSTYRVVSVLTVLHQDWLNGKEYKCKVSNKALYAPIEKTISKAK | |
| GGS- | GQPREPQVYTLPPSRDELTKNQVSLTCLVKGFYPSDIAVEWESNGQPEN | |
| L_wt_del_ | NYKTTPPVLDSDGSFFLYSKLTVDKSRWQQGNVFSCSVMHEALHNHYTQ | |
| APASSS_R38E_ | KSLSLSPGGGSPLGLAGGGSGGSTKKTQLQLEHLLLDLQMILNGINNYK | |
| K43E_E61K- | NPKLTEMLTFEFYMPKKATELKHLQCLEKELKPLEEVLNLAQSKNFHLR | |
| GGSGGSGRSDN | PRDLISNINVIVLELKGSETTFMCEYADETATIVEFLNRWITFSQSIIS | |
| QGGA- | TLTGGSGGSGRSDN [symbol] GGAELCDDKPPEIPHATFKAMAYKEGTMLNCKCK | |
| R_D6K_E29K_ | RGFRRIESGSLYMLCTGNSSHSSWDNQCQCTSSATRNTTKQVTPQPEEQ | |
| K38E | KERKTTEMQSPMQPVDQASLPGHCREPPPWENEATERIYHFVVGQMVYY | |
| | QCVQGYRALHRGPAESVCKMTHGKTRWTQPQLICTGE | |
| Chains 3 | DIVMTQTPLSLSVTPGQPASISCRASKSVSTSAYSYMHWYLQKPGQSPQ | 274 |
| and 4: | LLIYLASNLESGVPDRFSGSGSGTDFTLKISRVEAEDVGVYYCQHSREL | |
| 7_FAP-L1- | PYTFGQGTKLEIKRTVAAPSVFIFPPSDEQLKSGTASVVCLLNNFYPRE | |
| huIgkLC | AKVQWKVDNALQSGNSQESVTEQDSKDSTYSLSSTLTLSKADYEKHKVY | |
| | ACEVTHQGLSSPVTKSFNRGEC | |

P22301450 Activatable Proprotein

| | | |
|---|---|---|
| Chains 1 | EVQLVQSGAEVKKPGESLKISCKGSGYTFTENIIHWVRQMPGKGLEWIG | 275 |
| and 2: | WFHPGSGSIKYNEKFKDQVTISADKSISTAYLQWSSLKASDTAMYFCAR | |
| 242_FAP- | HGGTGRGAMDYWGQGTLVTVSSASTKGPSVFPLAPSSKSTSGGTAALGC | |
| VH1- | LVKDYFPEPVTVSWNSGALTSGVHTFPAVLQSSGLYSLSSVVTVPSSSL | |
| huIgG1(AAA)_ | GTQTYICNVNHKPSNTKVDKKVEPKSCDKTHTCPPCPAPEAAGGPSVFL | |
| delK- | FPPKPKDTLMISRTPEVTCVVVDVSHEDPEVKFNWYVDGVEVHNAKTKP | |
| GGSPLGLAGGGS | REEQYNSTYRVVSVLTVLHQDWLNGKEYKCKVSNKALYAPIEKTISKAK | |
| GGS- | GQPREPQVYTLPPSRDELTKNQVSLTCLVKGFYPSDIAVEWESNGQPEN | |
| L_wt_del_ | NYKTTPPVLDSDGSFFLYSKLTVDKSRWQQGNVFSCSVMHEALHNHYTQ | |
| APASSS_R38E_ | KSLSLSPGGGSPLGLAGGGSGGSTKKTQLQLEHLLLDLQMILNGINNYK | |
| K43E_E62K- | NPKLTEMLTFEFYMPKKATELKHLQCLEEKLKPLEEVLNLAQSKNFHLR | |
| GGSGGSGRSDN | PRDLISNINVIVLELKGSETTFMCEYADETATIVEFLNRWITFSQSIIS | |
| QGGA- | TLTGGSGGSGRSDN [symbol] GGAELCDDKPPEIPHATFKAMAYKEGTMLNCKCK | |
| R_D6K_E29K_ | RGFREIKSGSLYMLCTGNSSHSSWDNQCQCTSSATRNTTKQVTPQPEEQ | |
| R36E | KERKTTEMQSPMQPVDQASLPGHCREPPPWENEATERIYHFVVGQMVYY | |
| | QCVQGYRALHRGPAESVCKMTHGKTRWTQPQLICTGE | |
| Chains 3 | DIVMTQTPLSLSVTPGQPASISCRASKSVSTSAYSYMHWYLQKPGQSPQ | 276 |
| and 4: | LLIYLASNLESGVPDRFSGSGSGTDFTLKISRVEAEDVGVYYCQHSREL | |
| 7_FAP-L1- | PYTFGQGTKLEIKRTVTkAPSVFIFPPSDEQLKSGTASWCLLNNFYPRE | |
| huIgkLC | AKVQWKVDNALQSGNSQESVTEQDSKDSTYSLSSTLTLSKADYEKHKVY | |
| | ACEVTHQGLSSPVTKSFNRGEC | |

P22311450 Activatable Proprotein

| | | |
|---|---|---|
| Chains 1 | EVQLVQSGAEVKKPGESLKISCKGSGYTFTENIIHWVRQMPGKGLEWIG | 277 |
| and 2: | WFHPGSGSIKYNEKFKDQVTISADKSISTAYLQWSSLKASDTAMYFCAR | |
| 243_FAP- | HGGTGRGAMDYWGQGTLVTVSSASTKGPSVFPLAPSSKSTSGGTAALGC | |
| VH1- | LVKDYFPEPVTVSWNSGALTSGVHTFPAVLQSSGLYSLSSVVTVPSSSL | |
| huIgG1(AAA)_ | GTQTYICNVNHKPSNTKVDKKVEPKSCDKTHTCPPCPAPEAAGGPSVFL | |
| delK- | FPPKPKDTLMISRTPEVTCVVVDVSHEDPEVKFNWYVDGVEVHNAKTKP | |
| GGSPLGLAGGGS | REEQYNSTYRVVSVLTVLHQDWLNGKEYKCKVSNKALAAPIEKTISKAK | |
| GGS- | GQPREPQVYTLPPSRDELTKNQVSLTCLVKGFYPSDIAVEWESNGQPEN | |
| L_wt_del_ | NYKTTPPVLDSDGSFFLYSKLTVDKSRWQQGNVFSCSVMHEALHNHYTQ | |
| APASSS_R38E_ | KSLSLSPGGGSPLGLAGGGSGGSTKKTQLQLEHLLLDLQMILNGINNYK | |
| E61K_E62K- | NPKLTEMLTFKFYMPKKATELKHLQCLEKKLKPLEEVLNLAQSKNFHLR | |
| GGSGGSGRSDN | PRDLISNINVIVLELKGSETTFMCEYADETATIVEFLNRWITFSQSIIS | |
| QGGA- | TLTGGSGGSGRSDN [symbol] GGAELCDDKPPEIPHATFKAMAYKEGTMLNCECK | |
| R_D6K_R36E_ | RGFREIESGSLYMLCTGNSSHSSWDNQCQCTSSATRNTTKQVTPQPEEQ | |
| K38E | KERKTTEMQSPMQPVDQASLPGHCREPPPWENEATERIYHFVVGQMVYY | |
| | QCVQGYRALHRGPAESVCKMTHGKTRWTQPQLICTGE | |
| Chains 3 | DIVMTQTPLSLSVTPGQPASISCRASKSVSTSAYSYMHWYLQKPGQSPQ | 278 |
| and 4: | LLIYLASNLESGVPDRFSGSGSGTDFTLKISRVEAEDVGVYYCQHSREL | |
| 7_FAP-L1- | PYTFGQGTKLEIKRTVAAPSVFIFPPSDEQLKSGTASVVCLLNNFYPRE | |
| huIgkLC | AKVQWKVDNALQSGNSQESVTEQDSKDSTYSLSSTLTLSKADYEKHKVY | |
| | ACEVTHQGLSSPVTKSFNRGEC | |

P22321450 Activatable Proprotein

| | | |
|---|---|---|
| Chains 1 | EVQLVQSGAEVKKPGESLKISCKGSGYTFTENIIHWVRQMPGKGLEWIG | 279 |
| and 2: | WFHPGSGSIKYNEKFKDQVTISADKSISTAYLQWSSLKASDTAMYFCAR | |
| 244_FAP- | HGGTGRGAMDYWGQGTLVTVSSASTKGPSVFPLAPSSKSTSGGTAALGC | |
| VH1- | LVKDYFPEPVTVSWNSGALTSGVHTFPAVLQSSGLYSLSSVVTVPSSSL | |
| huIgG1(AAA)_ | GTQTYICNVNHKPSNTKVDKKVEPKSCDKTHTCPPCPAPEAAGGPSVFL | |
| delK- | FPPKPKDTLMISRTPEVTCVVVDVSHEDPEVKFNWYVDGVEVHNAKTKP | |
| GGSPLGLAGGGS | REEQYNSTYRVVSVLTVLHQDWLNGKEYKCKVSNKALYAPIEKTISKAK | |
| GGS- | GQPREPQVYTLPPSRDELTKNQVSLTCLVKGFYPSDIAVEWESNGQPEN | |
| L_wt_del_ | NYKTTPPVLDSDGSFFLYSKLTVDKSRWQQGNVFSCSVMHEALHNHYTQ | |
| APASSS_R38E_ | KSLSLSPGGGSPLGLAGGGSGGSTKKTQLQLEHLLLDLQMILNGINNYK | |
| K43E_E61K_ | NPKLTEMLTFEFYMPKKATELKHLQCLEKKLKPLEEVLNLAQSKNFHLR | |
| E62K- | PRDLISNINVIVLELKGSETTFMCEYADETATIVEFLNRWITFSQSIIS | |
| GGSGGSGRSDN | TLTGGSGGSGRSDN [symbol] GGAELCDDKPPEIPHATFKAMAYKEGTMLNCKCK | |
| QGGA- | RGFREIESGSLYMLCTGNSSHSSWDNQCQCTSSATRNTTKQVTPQPEEQ | |
| R_D6K_E29K_ | KERKTTEMQSPMQPVDQASLPGHCREPPPWENEATERIYHFVVGQMVYY | |
| R36E_K38E | QCVQGYRALHRGPAESVCKMTHGKTRWTQPQLICTGE | |
| Chains 3 | DIVMTQTPLSLSVTPGQPASISCRASKSVSTSAYSYMHWYLQKPGQSPQ | 280 |
| and 4: | LLIYLASNLESGVPDRFSGSGSGTDFTLKISRVEAEDVGVYYCQHSREL | |
| 7_FAP-L1- | PYTFGQGTKLEIKRTVAAPSVFIFPPSDEQLKSGTASVVCLLNNFYPRE | |
| huIgkLC | AKVQWKVDNALQSGNSQESVTEQDSKDSTYSLSSTLTLSKADYEKHKVY | |
| | ACEVTHQGLSSPVTKSFNRGEC | |

P22331450 Activatable Proprotein

| | | |
|---|---|---|
| Chains 1 | EVQLVQSGAEVKKPGESLKISCKGSGYTFTENIIHWVRQMPGKGLEWIG | 281 |
| and 2: | WFHPGSGSIKYNEKFKDQVTISADKSISTAYLQWSSLKASDTAMYFCAR | |
| 245_FAP- | HGGTGRGAMDYWGQGTLVTVSSASTKGPSVFPLAPSSKSTSGGTAALGC | |
| VH1- | LVKDYFPEPVTVSWNSGALTSGVHTFPAVLQSSGLYSLSSVVTVPSSSL | |
| huIgG1(AAA)_ | GTQTYICNVNHKPSNTKVDKKVEPKSCDKTHTCPPCPAPEAAGGPSVFL | |
| delK- | FPPKPKDTLMISRTPEVTCVVVDVSHEDPEVKFNWYVDGVEVHNAKTKP | |
| GGSPLGLAGGGS | REEQYNSTYRVVSVLTVLHQDWLNGKEYKCKVSNKALAAPIEKTISKAK | |
| GGS- | GQPREPQVYTLPPSRDELTKNQVSLTCLVKGFYPSDIAVEWESNGQPEN | |
| L_tm_del_ | NYKTTPPVLDSDGSFFLYSKLTVDKSRWQQGNVFSCSVMHEALHNHYTQ | |
| APASSSREK | KSLSLSPGGGSPLGLAGGGSGGSTKKTQLQLEHLLLDLQMILNGINNYK | |
| 43E_E62K- | NPKLTEMLTFEFYMPKKATELKHLQCLEEKLKPLEEALNLAPSKNFHLR | |
| GGSGGSGRSDN | PRDLISNINVIVLELKGSETTFMCEYADETATIVEFLNRWITFSQSTIS | |
| QGGA- | TLTGGSGGSGRSDN [symbol] GGAELCDDKPPEIPHATFKAMAYKEGTMLNCKCK | |
| R_D6K_E29K_ | RGFREIKSGSLYMLCTGNSSHSSWDNQCQCTSSATRNTTKQVTPQPEEQ | |
| R36E | KERKTTEMQSPMQPVDQASLPGHCREPPPWENEATERIYHFVVGQMVYY | |
| | QCVQGYRALHRGPAESVCKMTHGKTRWTQPQLICTGE | |
| Chains 3 | DIVMTQTPLSLSVTPGQPASISCRASKSVSTSAYSYMHWYLQKPGQSPQ | 282 |
| and 4: | LLIYLASNLESGVPDRFSGSGSGTDFTLKISRVEAEDVGVYYCQHSREL | |
| 7_FAP-L1- | PYTFGQGTKLEIKRTVAAPSVFIFPPSDEQLKSGTASVVCLLNNFYPRE | |
| huIgkLC | AKVQWKVDNALQSGNSQESVTEQDSKDSTYSLSSTLTLSKADYEKHKVY | |
| | ACEVTHQGLSSPVTKSFNRGEC | |

P22341450 Activatable Proprotein

| | | |
|---|---|---|
| Chains 1 | EVQLVQSGAEVKKPGESLKISCKGSGYTFTENIIHWVRQMPGKGLEWIG | 283 |
| and 2: | WFHPGSGSIKYNEKFKDQVTISADKSISTAYLQWSSLKASDTAMYFCAR | |
| 246_FAP- | HGGTGRGAMDYWGQGTLVTVSSASTKGPSVFPLAPSSKSTSGGTAALGC | |
| VH1- | LVKDYFPEPVTVSWNSGALTSGVHTFPAVLQSSGLYSLSSVVTVPSSSL | |
| huIgG1(AAA)_ | GTQTYICNVNHKPSNTKVDKKVEPKSCDKTHTCPPCPAPEAAGGPSVFL | |
| delK- | FPPKPKDTLMISRTPEVTCVVVDVSHEDPEVKFNWYVDGVEVHNAKTKP | |
| GGSPLGLAGGGS | REEQYNSTYRVVSVLTVLHQDWLNGKEYKCKVSNKALAAPIEKTISKAK | |
| GGS- | GQPREPQVYTLPPSRDELTKNQVSLTCLVKGFYPSDIAVEWESNGQPEN | |
| L_tm_del_ | NYKTTPPVLDSDGSFFLYSKLTVDKSRWQQGNVFSCSVMHEALHNHYTQ | |
| APASSS_R38E_ | KSLSLSPGGGSPLGLAGGGSGGSTKKTQLQLEHLLLDLQMILNGINNYK | |
| E61K_E62K- | NPKLTEMLTFKFYMPKKATELKHLQCLEKKLKPLEEALNLAPSKNFHLR | |
| GGSGGSGRSDN | PRDLISNINVIVLELKGSETTFMCEYADETATIVEFLNRWITFSQSTIS | |
| QGGA- | TLTGGSGGSGRSDN [symbol] GGAELCDDKPPEIPHATFKAMAYKEGTMLNCECK | |
| R_D6K_R36E_ | RGFREIESGSLYMLCTGNSSHSSWDNQCQCTSSATRNTTKQVTPQPEEQ | |
| K38E | KERKTTEMQSPMQPVDQASLPGHCREPPPWENEATERIYHFVVGQMVYY | |
| | QCVQGYRALHRGPAESVCKMTHGKTRWTQPQLICTGE | |
| Chains 3 | DIVMTQTPLSLSVTPGQPASISCRASKSVSTSAYSYMHWYLQKPGQSPQ | 284 |
| and 4: | LLIYLASNLESGVPDRFSGSGSGTDFTLKISRVEAEDVGVYYCQHSREL | |
| 7_FAP-L1- | PYTFGQGTKLEIKRTVAAPSVFIFPPSDEQLKSGTASVVCLLNNFYPRE | |
| huIgkLC | AKVQWKVDNALQSGNSQESVTEQDSKDSTYSLSSTLTLSKADYEKHKVY | |
| | ACEVTHQGLSSPVTKSFNRGEC | |

P22351450 Activatable Proprotein

| | | |
|---|---|---|
| Chains 1 | EVQLVQSGAEVKKPGESLKISCKGSGYTFTENIIHWVRQMPGKGLEWIG | 285 |
| and 2: | WFHPGSGSIKYNEKFKDQVTISADKSISTAYLQWSSLKASDTAMYFCAR | |
| 247_FAP- | HGGTGRGAMDYWGQGTLVTVSSASTKGPSVFPLAPSSKSTSGGTAALGC | |
| VH1- | LVKDYFPEPVTVSWNSGALTSGVHTFPAVLQSSGLYSLSSVVTVPSSSL | |
| huIgG1(AAA)_ | GTQTYICNVNHKPSNTKVDKKVEPKSCDKTHTCPPCPAPEAAGGPSVFL | |
| delK- | FPPKPKDTLMISRTPEVTCVVVDVSHEDPEVKFNWYVDGVEVHNAKTKP | |
| GGSPLGLAGGGS | REEQYNSTYRWSVLTVLHQDWLNGKEYKCKVSNKALYAPIEKTISKAK | |
| GGS- | GQPREPQVYTLPPSRDELTKNQVSLTCLVKGFYPSDIAVEWESNGQPEN | |
| L_tm_del_ | NYKTTPPVLDSDGSFFLYSKLTVDKSRWQQGNVFSCSVMHEALHNHYTQ | |
| APASSS_R38E_ | KSLSLSPGGGSPLGLAGGGSGGSTKKTQLQLEHLLLDLQMILNGINNYK | |
| K43E_E61K_ | NPKLTEMLTFEFYMPKKATELKHLQCLEKKLKPLEEALNLAPSKNFHLR | |
| E62K- | PRDLISNINVIVLELKGSETTFMCEYADETATIVEFLNRWITFSQSTIS | |
| GGSGGSGRSDN | TLTGGSGGSGRSDN [symbol] GGAELCDDKPPEIPHATFKAMAYKEGTMLNCKCK | |
| QGGA- | RGFREIESGSLYMLCTGNSSHSSWDNQCQCTSSATRNTTKQVTPQPEEQ | |
| R_D6K_E29K_ | KERKTTEMQSPMQPVDQASLPGHCREPPPWENEATERIYHFVVGQMVYY | |
| R36E_K38E | QCVQGYRALHRGPAESVCKMTHGKTRWTQPQLICTGE | |
| Chains 3 | DIVMTQTPLSLSVTPGQPASISCRASKSVSTSAYSYMHWYLQKPGQSPQ | 286 |
| and 4: | LLIYLASNLESGVPDRFSGSGSGTDFTLKISRVEAEDVGVYYCQHSREL | |
| 7_FAP-L1- | PYTFGQGTKLEIKRTVAAPSVFIFPPSDEQLKSGTASVVCLLNNFYPRE | |
| huIgkLC | AKVQWKVDNALQSGNSQESVTEQDSKDSTYSLSSTLTLSKADYEKHKVY | |
| | ACEVTHQGLSSPVTKSFNRGEC | |

P22701450 Activatable Proprotein

| | | |
|---|---|---|
| Chains 1 | EVQLVQSGAEVKKPGESLKISCKGSGYTFTENIIHWVRQMPGKGLEWIG | 287 |
| and 2: | WFHPGSGSIKYNEKFKDQVTISADKSISTAYLQWSSLKASDTAMYFCAR | |
| 259_FAP- | HGGTGRGAMDYWGQGTLVTVSSASTKGPSVFPLAPSSKSTSGGTAALGC | |
| VH1- | LVKDYFPEPVTVSWNSGALTSGVHTFPAVLQSSGLYSLSSVVTVPSSSL | |
| hulgG1(AAA)_ | GTQTYICNVNHKPSNTKVDKKVEPKSCDKTHTCPPCPAPEAAGGPSVFL | |
| delK- | FPPKPKDTLMISRTPEVTCVVVDVSHEDPEVKFNWYVDGVEVHNAKTKP | |
| GGSPLGLAGGGS | REEQYNSTYRWSVLTVLHQDWLNGKEYKCKVSNKALTXAPIEKTISKAK | |
| GG- | GQPREPQVYTLPPSRDELTKNQVSLTCLVKGFYPSDIAVEWESNGQPEN | |
| L_wt_del_ | NYKTTPPVLDSDGSFFLYSKLTVDKSRWQQGNVFSCSVMHEALHNHYTQ | |
| APASS_K43E_ | KSLSLSPGGGSPLGLAGGGSGGSTKKTQLQLEHLLLDLQMILNGINNYK | |
| E62K- | NPKLTRMLTFEFYMPKKATELKHLQCLEEKLKPLEEVLNLAQSKNFHLR | |
| GGSGGSGRSDN | PRDLISNINVIVLELKGSETTFMCEYADETATIVEFLNRWITFSQSIIS | |
| QGGA- | TLTGGSGGSGRSDN [symbol] GGAELCDDDPPEIPHATFKAMAYKEGTMLNCKCK | |
| R_E29K_R36E | RGFREIKSGSLYMLCTGNSSHSSWDNQCQCTSSATRNTTKQVTPQPEEQ | |
| | KERKTTEMQSPMQPVDQASLPGHCREPPPWENEATERIYHFVVGQMVYY | |
| | QCVQGYRALHRGPAESVCKMTHGKTRWTQPQLICTGE | |
| Chains 3 | DIVMTQTPLSLSVTPGQPASISCRASKSVSTSAYSYMHWYLQKPGQSPQ | 288 |
| and 4: | LLIYLASNLESGVPDRFSGSGSGTDFTLKISRVEAEDVGVYYCQHSREL | |
| 7_FAP-L1- | PYTFGQGTKLEIKRTVAAPSVFIFPPSDEQLKSGTASVVCLLNNFYPRE | |
| huIgkLC | AKVQWKVDNALQSGNSQESVTEQDSKDSTYSLSSTLTLSKADYEKHKVY | |
| | ACEVTHQGLSSPVTKSFNRGEC | |

P22711450 Activatable Proprotein

| | | |
|---|---|---|
| Chains 1 | EVQLVQSGAEVKKPGESLKISCKGSGYTFTENIIHWVRQMPGKGLEWIG | 289 |
| and 2: | WFHPGSGSIKYNEKFKDQVTISADKSISTAYLQWSSLKASDTAMYFCAR | |
| 260_FAP- | HGGTGRGAMDYWGQGTLVTVSSASTKGPSVFPLAPSSKSTSGGTAALGC | |
| VH1- | LVKDYFPEPVTVSWNSGALTSGVHTFPAVLQSSGLYSLSSVVTVPSSSL | |
| huIgG1(AAA)_ | GTQTYICNVNHKPSNTKVDKKVEPKSCDKTHTCPPCPAPEAAGGPSVFL | |
| delK- | FPPKPKDTLMISRTPEVTCVVVDVSHEDPEVKFNWYVDGVEVHNAKTKP | |
| GGSPLGLAGGGS | REEQYNSTYRVVSVLTVLHQDWLNGKEYKCKVSNKALAAPIEKTISKAK | |
| GG- | GQPREPQVYTLPPSRDELTKNQVSLTCLVKGFYPSDIAVEWESNGQPEN | |
| L_wt_del_ | NYKTTPPVLDSDGSFFLYSKLTVDKSRWQQGNVFSCSVMHEALHNHYTQ | |
| APASS_K43E_ | KSLSLSPGGGSPLGLAGGGSGGSTKKTQLQLEHLLLDLQMILNGINNYK | |
| E62K- | NPKLTRMLTFEFYMPKKATELKHLQCLEEKLKPLEEVLNLAQSKNFHLR | |
| GGSGGSGRSDN | PRDLISNINVIVLELKGSETTFMCEYADETATIVEFLNRWITFSQSIIS | |
| QGGA- | TLTGGSGGSGRSDN [symbol] GGAELCDDEPPEIPHATFKAMAYKEGTMLNCKCK | |
| R_E29K_R36E_ | RGFREIKSGSLYMLCTGNSSHSSWDNQCQCTSSATRNTTKQVTPQPEEQ | |
| D6E | KERKTTEMQSPMQPVDQASLPGHCREPPPWENEATERIYHFVVGQMVYY | |
| | QCVQGYRALHRGPAESVCKMTHGKTRWTQPQLICTGE | |
| Chains 3 | DIVMTQTPLSLSVTPGQPASISCRASKSVSTSAYSYMHWYLQKPGQSPQ | 290 |
| and 4: | LLIYLASNLESGVPDRFSGSGSGTDFTLKISRVEAEDVGVYYCQHSREL | |
| 7_FAP-L1- | PYTFGQGTKLEIKRTVAAPSVFIFPPSDEQLKSGTASVVCLLNNFYPRE | |
| huIgkLC | AKVQWKVDNALQSGNSQESVTEQDSKDSTYSLSSTLTLSKADYEKHKVY | |
| | ACEVTHQGLSSPVTKSFNRGEC | |

P22721450 Activatable Proprotein

| | | |
|---|---|---|
| Chains 1 | EVQLVQSGAEVKKPGESLKISCKGSGYTFTENIIHWVRQMPGKGLEWIG | 291 |
| and 2: | WFHPGSGSIKYNEKFKDQVTISADKSISTAYLQWSSLKASDTAMYFCAR | |
| 261_FAP- | HGGTGRGAMDYWGQGTLVTVSSASTKGPSVFPLAPSSKSTSGGTAALGC | |
| VH1- | LVKDYFPEPVTVSWNSGALTSGVHTFPAVLQSSGLYSLSSVVTVPSSSL | |
| huIgG1(AAA)_ | GTQTYICNVNHKPSNTKVDKKVEPKSCDKTHTCPPCPAPEAAGGPSVFL | |
| delK- | FPPKPKDTLMISRTPEVTCVVVDVSHEDPEVKFNWYVDGVEVHNAKTKP | |
| GGSPLGLAGGGS | REEQYNSTYRVVSVLTVLHQDWLNGKEYKCKVSNKALAAPIEKTISKAK | |
| GG- | GQPREPQVYTLPPSRDELTKNQVSLTCLVKGFYPSDIAVEWESNGQPEN | |
| L_wt_del_ | NYKTTPPVLDSDGSFFLYSKLTVDKSRWQQGNVFSCSVMHEALHNHYTQ | |
| APASS_K43E_ | KSLSLSPGGGSPLGLAGGGSGGSTKKTQLQLEHLLLDLQMILNGINNYK | |
| E61K_E62K- | NPKLTRMLTFEFYMPKKATELKHLQCLEKKLKPLEEVLNLAQSKNFHLR | |
| GGSGGSGRSDN | PRDLISNINVIVLELKGSETTFMCEYADETATIVEFLNRWITFSQSIIS | |
| QGGA- | TLTGGSGGSGRSDN [symbol] GGAELCDDDPPEIPHATFKAMAYKEGTMLNCKCK | |
| R_E29K_R36E_ | RGFREIESGSLYMLCTGNSSHSSWDNQCQCTSSATRNTTKQVTPQPEEQ | |
| K38E | KERKTTEMQSPMQPVDQASLPGHCREPPPWENEATERIYHFVVGQMVYY | |
| | QCVQGYRALHRGPAESVCKMTHGKTRWTQPQLICTGE | |
| Chains 3 | DIVMTQTPLSLSVTPGQPASISCRASKSVSTSAYSYMHWYLQKPGQSPQ | 292 |
| and 4: | LLIYLASNLESGVPDRFSGSGSGTDFTLKISRVEAEDVGVYYCQHSREL | |
| 7_FAP-L1- | PYTFGQGTKLEIKRTVAAPSVFIFPPSDEQLKSGTASVVCLLNNFYPRE | |
| huIgkLC | AKVQWKVDNALQSGNSQESVTEQDSKDSTYSLSSTLTLSKADYEKHKVY | |
| | ACEVTHQGLSSPVTKSFNRGEC | |

P22731450 Activatable Proprotein

| | | |
|---|---|---|
| Chains 1 | EVQLVQSGAEVKKPGESLKISCKGSGYTFTENIIHWVRQMPGKGLEWIG | 293 |
| and 2: | WFHPGSGSIKYNEKFKDQVTISADKSISTAYLQWSSLKASDTAMYFCAR | |
| 262_FAP- | HGGTGRGAMDYWGQGTLVTVSSASTKGPSVFPLAPSSKSTSGGTAALGC | |
| VH1- | LVKDYFPEPVTVSWNSGALTSGVHTFPAVLQSSGLYSLSSVVTVPSSSL | |
| huIgG1(AAA)_ | GTQTYICNVNHKPSNTKVDKKVEPKSCDKTHTCPPCPAPEAAGGPSVFL | |
| delK- | FPPKPKDTLMISRTPEVTCVVVDVSHEDPEVKFNWYVDGVEVHNAKTKP | |
| GGSPLGLAGGGS | REEQYNSTYRVVSVLTVLHQDWLNGKEYKCKVSNKALAAPIEKTISKAK | |
| GG- | GQPREPQVYTLPPSRDELTKNQVSLTCLVKGFYPSDIAVEWESNGQPEN | |
| L_wt_del_ | NYKTTPPVLDSDGSFFLYSKLTVDKSRWQQGNVFSCSVMHEALHNHYTQ | |
| APASS_K43E_ | KSLSLSPGGGSPLGLAGGGSGGSTKKTQLQLEHLLLDLQMILNGINNYK | |
| E61K_E62K- | NPKLTRMLTFEFYMPKKATELKHLQCLEKKLKPLEEVLNLAQSKNFHLR | |
| GGSGGSGRSDN | PRDLISNINVIVLELKGSETTFMCEYADETATIVEFLNRWITFSQSIIS | |
| QGGA- | TLTGGSGGSGRSDN [symbol] GGAELCDDEPPEIPHATFKAMAYKEGTMLNCKCK | |
| R_E29K_R36E_ | RGFREIESGSLYMLCTGNSSHSSWDNQCQCTSSATRNTTKQVTPQPEEQ | |
| K38E_D6E | KERKTTEMQSPMQPVDQASLPGHCREPPPWENEATERIYHFVVGQMVYY | |
| | QCVQGYRALHRGPAESVCKMTHGKTRWTQPQLICTGE | |
| Chains 3 | DIVMTQTPLSLSVTPGQPASISCRASKSVSTSAYSYMHWYLQKPGQSPQ | 294 |
| and 4: | LLIYLASNLESGVPDRFSGSGSGTDFTLKISRVEAEDVGVYYCQHSREL | |
| 7_FAP-L1- | PYTFGQGTKLEIKRTVAAPSVFIFPPSDEQLKSGTASVVCLLNNFYPRE | |
| huIgkLC | AKVQWKVDNALQSGNSQESVTEQDSKDSTYSLSSTLTLSKADYEKHKVY | |
| | ACEVTHQGLSSPVTKSFNRGEC | |

P22751450 Protein

| | | |
|---|---|---|
| Chains 1 | EVQLVQSGAEVKKPGESLKISCKGSGYTFTENIIHWVRQMPGKGLEWIG | 295 |
| and 2: | WFHPGSGSIKYNEKFKDQVTISADKSISTAYLQWSSLKASDTAMYFCAR | |
| 264_FAP- | HGGTGRGAMDYWGQGTLVTVSSASTKGPSVFPLAPSSKSTSGGTAALGC | |
| VH1- | LVKDYFPEPVTVSWNSGALTSGVHTFPAVLQSSGLYSLSSVVTVPSSSL | |
| huIgG1(AAA)_ | GTQTYICNVNHKPSNTKVDKKVEPKSCDKTHTCPPCPAPEAAGGPSVFL | |
| delK- | FPPKPKDTLMISRTPEVTCVVVDVSHEDPEVKFNWYVDGVEVHNAKTKP | |
| GGSGGSGGSGGS | REEQYNSTYRVVSVLTVLHQDWLNGKEYKCKVSNKALYAPIEKTISKAK | |
| GG- | GQPREPQVYTLPPSRDELTKNQVSLTCLVKGFYPSDIAVEWESNGQPEN | |
| L_wt_del_ | NYKTTPPVLDSDGSFFLYSKLTVDKSRWQQGNVFSCSVMHEALHNHYTQ | |
| APASS_R38E_ | KSLSLSPGGGSGGSGGSGGSGGSTKKTQLQLEHLLLDLQMILNGINNYK | |
| K43E_E61K_ | NPKLTEMLTFEFYMPKKATELKHLQCLEKKLKPLEEVLNLAQSKNFHLR | |
| E62K- | PRDLISNINVIVLELKGSETTFMCEYADETATIVEFLNRWITFSQSIIS | |
| GGSGGSGGSGG | TLTGGSGGSGGSGGSGGAELCDDKPPEIPHATFKAMAYKEGTMLNCKCK | |
| SGGA- | RGFREIESGSLYMLCTGNSSHSSWDNQCQCTSSATRNTTKQVTPQPEEQ | |
| R_D6K_E29K_ | KERKTTEMQSPMQPVDQASLPGHCREPPPWENEATERIYHFVVGQMVYY | |
| R36E_K38E | QCVQGYRALHRGPAESVCKMTHGKTRWTQPQLICTGE | |
| Chains 3 | DIVMTQTPLSLSVTPGQPASISCRASKSVSTSAYSYMHWYLQKPGQSPQ | 296 |
| and 4: | LLIYLASNLESGVPDRFSGSGSGTDFTLKISRVEAEDVGVYYCQHSREL | |
| 7_FAP-L1- | PYTFGQGTKLEIKRTVAAPSVFIFPPSDEQLKSGTASVVCLLNNFYPRE | |
| huIgkLC | AKVQWKVDNALQSGNSQESVTEQDSKDSTYSLSSTLTLSKADYEKHKVY | |
| | ACEVTHQGLSSPVTKSFNRGEC | |

P22841450 Activatable Proprotein

| | | |
|---|---|---|
| Chains 1 | EVQLVQSGAEVKKPGESLKISCKGSGYTFTENIIHWVRQMPGKGLEWIG | 297 |
| and 2: | WFHPGSGSIKYNEKFKDQVTISADKSISTAYLQWSSLKASDTAMYFCAR | |
| 277_FAP- | HGGTGRGAMDYWGQGTLVTVSSASTKGPSVFPLAPSSKSTSGGTAALGC | |
| VH1- | LVKDYFPEPVTVSWNSGALTSGVHTFPAVLQSSGLYSLSSVVTVPSSSL | |
| huIgG1(AAA)_ | GTQTYICNVNHKPSNTKVDKKVEPKSCDKTHTCPPCPAPEAAGGPSVFL | |
| delK- | FPPKPKDTLMISRTPEVTCVVVDVSHEDPEVKFNWYVDGVEVHNAKTKP | |
| GGSPLGLAGGGS | REEQYNSTYRVVSVLTVLHQDWLNGKEYKCKVSNKALYAPIEKTISKAK | |
| GG- | GQPREPQVYTLPPSRDELTKNQVSLTCLVKGFYPSDIAVEWESNGQPEN | |
| L_wt_del_ | NYKTTPPVLDSDGSFFLYSKLTVDKSRWQQGNVFSCSVMHEALHNHYTQ | |
| APASS_R38E_ | KSLSLSPGGGSPLGLAGGGSGGSTKKTQLQLEHLLLDLQMILNGINNYK | |
| K43E_E62R- | NPKLTEMLTFEFYMPKKATELKHLQCLEERLKPLEEVLNLAQSKNFHLR | |
| GGSGGSGRSDN | PRDLISNINVIVLELKGSETTFMCEYADETATIVEFLNRWITFSQSIIS | |
| QGGA- | TLTGGSGGSGRSDN [symbol] GGAELCDDKPPEIPHATFKAMAYKEGTMLNCKCK | |
| RDKEK | RGFREIKSGSLYMLCTGNSSHSSWDNQCQCTSSATRNTTKQVTPQPEEQ | |
| R36E | KERKTTEMQSPMQPVDQASLPGHCREPPPWENEATERIYHFVVGQMVYY | |
| | QCVQGYRALHRGPAESVCKMTHGKTRWTQPQLICTGE | |
| Chains 3 | DIVMTQTPLSLSVTPGQPASISCRASKSVSTSAYSYMHWYLQKPGQSPQ | 298 |
| and 4: | LLIYLASNLESGVPDRFSGSGSGTDFTLKISRVEAEDVGVYYCQHSREL | |
| 7_FAP-L1- | PYTFGQGTKLEIKRTVTkAPSVFIFPPSDEQLKSGTASWCLLNNFYPRE | |
| huIgkLC | AKVQWKVDNALQSGNSQESVTEQDSKDSTYSLSSTLTLSKADYEKHKVY | |
| | ACEVTHQGLSSPVTKSFNRGEC | |

P22851450 Activatable Proprotein

| | | |
|---|---|---|
| Chains 1 | EVQLVQSGAEVKKPGESLKISCKGSGYTFTENIIHWVRQMPGKGLEWIG | 299 |
| and 2: | WFHPGSGSIKYNEKFKDQVTISADKSISTAYLQWSSLKASDTAMYFCAR | |
| 278_FAP- | HGGTGRGAMDYWGQGTLVTVSSASTKGPSVFPLAPSSKSTSGGTAALGC | |
| VH1- | LVKDYFPEPVTVSWNSGALTSGVHTFPAVLQSSGLYSLSSVVTVPSSSL | |
| hulgG1(AAA)_ | GTQTYICNVNHKPSNTKVDKKVEPKSCDKTHTCPPCPAPEAAGGPSVFL | |
| delK- | FPPKPKDTLMISRTPEVTCVVVDVSHEDPEVKFNWYVDGVEVHNAKTKP | |
| GGSPLGLAGGGS | REEQYNSTYRVVSVLTVLHQDWLNGKEYKCKVSNKALAAPIEKTISKAK | |
| GG- | GQPREPQVYTLPPSRDELTKNQVSLTCLVKGFYPSDIAVEWESNGQPEN | |
| L_wt_del_ | NYKTTPPVLDSDGSFFLYSKLTVDKSRWQQGNVFSCSVMHEALHNHYTQ | |
| APASS_R38E_ | KSLSLSPGGGSPLGLAGGGSGGSTKKTQLQLEHLLLDLQMILNGINNYK | |
| K43E_E62M- | NPKLTEMLTFEFYMPKKATELKHLQCLEEMLKPLEEVLNLAQSKNFHLR | |
| GGSGGSGRSDN | PRDLISNINVIVLELKGSETTFMCEYADETATIVEFLNRWITFSQSIIS | |
| QGGA- | TLTGGSGGSGRSDN [symbol] GGAELCDDKPPEIPHATFKAMAYKEGTMLNCKCK | |
| R_D6K_E29K_ | RGFRMIKSGSLYMLCTGNSSHSSWDNQCQCTSSATRNTTKQVTPQPEEQ | |
| R36M | KERKTTEMQSPMQPVDQASLPGHCREPPPWENEATERIYHFVVGQMVYY | |
| | QCVQGYRALHRGPAESVCKMTHGKTRWTQPQLICTGE | |
| Chains 3 | DIVMTQTPLSLSVTPGQPASISCRASKSVSTSAYSYMHWYLQKPGQSPQ | 300 |
| and 4: | LLIYLASNLESGVPDRFSGSGSGTDFTLKISRVEAEDVGVYYCQHSREL | |
| 7_FAP-L1- | PYTFGQGTKLEIKRTVAAPSVFIFPPSDEQLKSGTASVVCLLNNFYPRE | |
| huIgkLC | AKVQWKVDNALQSGNSQESVTEQDSKDSTYSLSSTLTLSKADYEKHKVY | |
| | ACEVTHQGLSSPVTKSFNRGEC | |

P22861450 Activatable Proprotein

| | | |
|---|---|---|
| Chains 1 | EVQLVQSGAEVKKPGESLKISCKGSGYTFTENIIHWVRQMPGKGLEWIG | 301 |
| and 2: | WFHPGSGSIKYNEKFKDQVTISADKSISTAYLQWSSLKASDTAMYFCAR | |
| 279_FAP- | HGGTGRGAMDYWGQGTLVTVSSASTKGPSVFPLAPSSKSTSGGTAALGC | |
| VH1- | LVKDYFPEPVTVSWNSGALTSGVHTFPAVLQSSGLYSLSSVVTVPSSSL | |
| huIgG1(AAA)_ | GTQTYICNVNHKPSNTKVDKKVEPKSCDKTHTCPPCPAPEAAGGPSVFL | |
| delK- | FPPKPKDTLMISRTPEVTCVVVDVSHEDPEVKFNWYVDGVEVHNAKTKP | |
| GGSPLGLAGGGS | REEQYNSTYRVVSVLTVLHQDWLNGKEYKCKVSNKALYAPIEKTISKAK | |
| GG- | GQPREPQVYTLPPSRDELTKNQVSLTCLVKGFYPSDIAVEWESNGQPEN | |
| L_wt_del_ | NYKTTPPVLDSDGSFFLYSKLTVDKSRWQQGNVFSCSVMHEALHNHYTQ | |
| APASS_R38E_ | KSLSLSPGGGSPLGLAGGGSGGSTKKTQLQLEHLLLDLQMILNGINNYK | |
| K43E_E62M- | NPKLTEMLTFEFYMPKKATELKHLQCLEEMLKPLEEVLNLAQSKNFHLR | |
| GGSGGSGRSDN | PRDLISNINVIVLELKGSETTFMCEYADETATIVEFLNRWITFSQSIIS | |
| QGGA- | TLTGGSGGSGRSDN [symbol] GGAELCDDKPPEIPHATFKAMAYKEGTMLNCKCK | |
| R_D6K_E29K_ | RGFRFIKSGSLYMLCTGNSSHSSWDNQCQCTSSATRNTTKQVTPQPEEQ | |
| R36F | KERKTTEMQSPMQPVDQASLPGHCREPPPWENEATERIYHFVVGQMVYY | |
| | QCVQGYRALHRGPAESVCKMTHGKTRWTQPQLICTGE | |
| Chains 3 | DIVMTQTPLSLSVTPGQPASISCRASKSVSTSAYSYMHWYLQKPGQSPQ | 302 |
| and 4: | LLIYLASNLESGVPDRFSGSGSGTDFTLKISRVEAEDVGVYYCQHSREL | |
| 7_FAP-L1- | PYTFGQGTKLEIKRTVAAPSVFIFPPSDEQLKSGTASVVCLLNNFYPRE | |
| huIgkLC | AKVQWKVDNALQSGNSQESVTEQDSKDSTYSLSSTLTLSKADYEKHKVY | |
| | ACEVTHQGLSSPVTKSFNRGEC | |

P22871450 Activatable Proprotein

| | | |
|---|---|---|
| Chains 1 | EVQLVQSGAEVKKPGESLKISCKGSGYTFTENIIHWVRQMPGKGLEWIG | 303 |
| and 2: | WFHPGSGSIKYNEKFKDQVTISADKSISTAYLQWSSLKASDTAMYFCAR | |
| 280_FAP- | HGGTGRGAMDYWGQGTLVTVSSASTKGPSVFPLAPSSKSTSGGTAALGC | |
| VH1- | LVKDYFPEPVTVSWNSGALTSGVHTFPAVLQSSGLYSLSSVVTVPSSSL | |
| huIgG1(AAA)_ | GTQTYICNVNHKPSNTKVDKKVEPKSCDKTHTCPPCPAPEAAGGPSVFL | |
| delK- | FPPKPKDTLMISRTPEVTCVVVDVSHEDPEVKFNWYVDGVEVHNAKTKP | |
| GGSPLGLAGGGS | REEQYNSTYRVVSVLTVLHQDWLNGKEYKCKVSNKALAAPIEKTISKAK | |
| GG- | GQPREPQVYTLPPSRDELTKNQVSLTCLVKGFYPSDIAVEWESNGQPEN | |
| L_wt_del_ | NYKTTPPVLDSDGSFFLYSKLTVDKSRWQQGNVFSCSVMHEALHNHYTQ | |
| APASS_R38E_ | KSLSLSPGGGSPLGLAGGGSGGSTKKTQLQLEHLLLDLQMILNGINNYK | |
| K43E_E62L- | NPKLTEMLTFEFYMPKKATELKHLQCLEELLKPLEEVLNLAQSKNFHLR | |
| GGSGGSGRSDN | PRDLISNINVIVLELKGSETTFMCEYADETATIVEFLNRWITFSQSIIS | |
| QGGA- | TLTGGSGGSGRSDN [symbol] GGAELCDDKPPEIPHATFKAMAYKEGTMLNCKCK | |
| R_D6K_E29K_ | RGFRFIKSGSLYMLCTGNSSHSSWDNQCQCTSSATRNTTKQVTPQPEEQ | |
| R36F | KERKTTEMQSPMQPVDQASLPGHCREPPPWENEATERIYHFVVGQMVYY | |
| | QCVQGYRALHRGPAESVCKMTHGKTRWTQPQLICTGE | |
| Chains 3 | DIVMTQTPLSLSVTPGQPASISCRASKSVSTSAYSYMHWYLQKPGQSPQ | 304 |
| and 4: | LLIYLASNLESGVPDRFSGSGSGTDFTLKISRVEAEDVGVYYCQHSREL | |
| 7_FAP-L1- | PYTFGQGTKLEIKRTVAAPSVFIFPPSDEQLKSGTASWCLLNNFYPRE | |
| huIgkLC | AKVQWKVDNALQSGNSQESVTEQDSKDSTYSLSSTLTLSKADYEKHKVY | |
| | ACEVTHQGLSSPVTKSFNRGEC | |

P22881450 Activatable Proprotein

| | | |
|---|---|---|
| Chains 1 | EVQLVQSGAEVKKPGESLKISCKGSGYTFTENIIHWVRQMPGKGLEWIG | 305 |
| and 2: | WFHPGSGSIKYNEKFKDQVTISADKSISTAYLQWSSLKASDTAMYFCAR | |
| 281_FAP- | HGGTGRGAMDYWGQGTLVTVSSASTKGPSVFPLAPSSKSTSGGTAALGC | |
| VH1- | LVKDYFPEPVTVSWNSGALTSGVHTFPAVLQSSGLYSLSSVVTVPSSSL | |
| huIgG1(AAA)_ | GTQTYICNVNHKPSNTKVDKKVEPKSCDKTHTCPPCPAPEAAGGPSVFL | |
| delK- | FPPKPKDTLMISRTPEVTCVVVDVSHEDPEVKFNWYVDGVEVHNAKTKP | |
| GGSPLGLAGGGS | REEQYNSTYRVVSVLTVLHQDWLNGKEYKCKVSNKALAAPIEKTISKAK | |
| GG- | GQPREPQVYTLPPSRDELTKNQVSLTCLVKGFYPSDIAVEWESNGQPEN | |
| L_wt_del_ | NYKTTPPVLDSDGSFFLYSKLTVDKSRWQQGNVFSCSVMHEALHNHYTQ | |
| APASS_K35E_ | KSLSLSPGGGSPLGLAGGGSGGSTKKTQLQLEHLLLDLQMILNGINNYK | |
| R38E_K43E- | NPELTEMLTFEFYMPKKATELKHLQCLEEELKPLEEVLNLAQSKNFHLR | |
| GGSGGSGRSDN | PRDLISNINVIVLELKGSETTFMCEYADETATIVEFLNRWITFSQSIIS | |
| QGGA- | TLTGGSGGSGRSDN [symbol] GGAELCKDKPPEIPHATFKAMAYKEGTMLNCKCK | |
| R_D4K_D6K_ | RGFRRIKSGSLYMLCTGNSSHSSWDNQCQCTSSATRNTTKQVTPQPEEQ | |
| E29K | KERKTTEMQSPMQPVDQASLPGHCREPPPWENEATERIYHFVVGQMVYY | |
| | QCVQGYRALHRGPAESVCKMTHGKTRWTQPQLICTGE | |
| Chains 3 | DIVMTQTPLSLSVTPGQPASISCRASKSVSTSAYSYMHWYLQKPGQSPQ | 306 |
| and 4: | LLIYLASNLESGVPDRFSGSGSGTDFTLKISRVEAEDVGVYYCQHSREL | |
| 7_FAP-L1- | PYTFGQGTKLEIKRTVAAPSVFIFPPSDEQLKSGTASVVCLLNNFYPRE | |
| huIgkLC | AKVQWKVDNALQSGNSQESVTEQDSKDSTYSLSSTLTLSKADYEKHKVY | |
| | ACEVTHQGLSSPVTKSFNRGEC | |

P22891450 Activatable Proprotein

| | | |
|---|---|---|
| Chains 1 | EVQLVQSGAEVKKPGESLKISCKGSGYTFTENIIHWVRQMPGKGLEWIG | 307 |
| and 2: | WFHPGSGSIKYNEKFKDQVTISADKSISTAYLQWSSLKASDTAMYFCAR | |
| 282_FAP- | HGGTGRGAMDYWGQGTLVTVSSASTKGPSVFPLAPSSKSTSGGTAALGC | |
| VH1- | LVKDYFPEPVTVSWNSGALTSGVHTFPAVLQSSGLYSLSSVVTVPSSSL | |
| huIgG1(AAA)_ | GTQTYICNVNHKPSNTKVDKKVEPKSCDKTHTCPPCPAPEAAGGPSVFL | |
| delK- | FPPKPKDTLMISRTPEVTCVVVDVSHEDPEVKFNWYVDGVEVHNAKTKP | |
| GGSPLGLAGGGS | REEQYNSTYRVVSVLTVLHQDWLNGKEYKCKVSNKALYAPIEKTISKAK | |
| GG- | GQPREPQVYTLPPSRDELTKNQVSLTCLVKGFYPSDIAVEWESNGQPEN | |
| L_wt_del_ | NYKTTPPVLDSDGSFFLYSKLTVDKSRWQQGNVFSCSVMHEALHNHYTQ | |
| APASS_K35E_ | KSLSLSPGGGSPLGLAGGGSGGSTKKTQLQLEHLLLDLQMILNGINNYK | |
| R38E_E61K- | NPELTEMLTFKFYMPKKATELKHLQCLEKELKPLEEVLNLAQSKNFHLR | |
| GGSGGSGRSDN | PRDLISNINVIVLELKGSETTFMCEYADETATIVEFLNRWITFSQSIIS | |
| QGGA- | TLTGGSGGSGRSDN [symbol] GGAELCKDKPPEIPHATFKAMAYKEGTMLNCECK | |
| R_D4K_D6K_ | RGFRRIESGSLYMLCTGNSSHSSWDNQCQCTSSATRNTTKQVTPQPEEQ | |
| K38E | KERKTTEMQSPMQPVDQASLPGHCREPPPWENEATERIYHFVVGQMVYY | |
| | QCVQGYRALHRGPAESVCKMTHGKTRWTQPQLICTGE | |
| Chains 3 | DIVMTQTPLSLSVTPGQPASISCRASKSVSTSAYSYMHWYLQKPGQSPQ | 308 |
| and 4: | LLIYLASNLESGVPDRFSGSGSGTDFTLKISRVEAEDVGVYYCQHSREL | |
| 7_FAP-L1- | PYTFGQGTKLEIKRTVAAPSVFIFPPSDEQLKSGTASVVCLLNNFYPRE | |
| huIgkLC | AKVQWKVDNALQSGNSQESVTEQDSKDSTYSLSSTLTLSKADYEKHKVY | |
| | ACEVTHQGLSSPVTKSFNRGEC | |

P22901450 Activatable Proprotein

| | | |
|---|---|---|
| Chains 1 | EVQLVQSGAEVKKPGESLKISCKGSGYTFTENIIHWVRQMPGKGLEWIG | 309 |
| and 2: | WFHPGSGSIKYNEKFKDQVTISADKSISTAYLQWSSLKASDTAMYFCAR | |
| 283_FAP- | HGGTGRGAMDYWGQGTLVTVSSASTKGPSVFPLAPSSKSTSGGTAALGC | |
| VH1- | LVKDYFPEPVTVSWNSGALTSGVHTFPAVLQSSGLYSLSSVVTVPSSSL | |
| huIgG1(AAA)_ | GTQTYICNVNHKPSNTKVDKKVEPKSCDKTHTCPPCPAPEAAGGPSVFL | |
| delK- | FPPKPKDTLMISRTPEVTCVVVDVSHEDPEVKFNWYVDGVEVHNAKTKP | |
| GGSPLGLAGGGS | REEQYNSTYRVVSVLTVLHQDWLNGKEYKCKVSNKALAAPIEKTISKAK | |
| GG- | GQPREPQVYTLPPSRDELTKNQVSLTCLVKGFYPSDIAVEWESNGQPEN | |
| L_wt_del_ | NYKTTPPVLDSDGSFFLYSKLTVDKSRWQQGNVFSCSVMHEALHNHYTQ | |
| APASS- | KSLSLSPGGGSPLGLAGGGSGGSTKKTQLQLEHLLLDLQMILNGINNYK | |
| GGSGGSGRSDN | NPKLTRMLTFKFYMPKKATELKHLQCLEEELKPLEEVLNLAQSKNFHLR | |
| QGGA-R | PRDLISNINVIVLELKGSETTFMCEYADETATIVEFLNRWITFSQSIIS | |
| | TLTGGSGGSGRSDN [symbol] GGAELCDDDPPEIPHATFKAMAYKEGTMLNCECK | |
| | RGFRRIKSGSLYMLCTGNSSHSSWDNQCQCTSSATRNTTKQVTPQPEEQ | |
| | KERKTTEMQSPMQPVDQASLPGHCREPPPWENEATERIYHFVVGQMVYY | |
| | QCVQGYRALHRGPAESVCKMTHGKTRWTQPQLICTGE | |
| Chains 3 | DIVMTQTPLSLSVTPGQPASISCRASKSVSTSAYSYMHWYLQKPGQSPQ | 310 |
| and 4: | LLIYLASNLESGVPDRFSGSGSGTDFTLKISRVEAEDVGVYYCQHSREL | |
| 7_FAP-L1- | PYTFGQGTKLEIKRTVAAPSVFIFPPSDEQLKSGTASVVCLLNNFYPRE | |
| huIgkLC | AKVQWKVDNALQSGNSQESVTEQDSKDSTYSLSSTLTLSKADYEKHKVY | |
| | ACEVTHQGLSSPVTKSFNRGEC | |

P22911450 Activatable Proprotein

| | | |
|---|---|---|
| Chains 1 | EVQLVQSGAEVKKPGESLKISCKGSGYTFTENIIHWVRQMPGKGLEWIG | 311 |
| and 2: | WFHPGSGSIKYNEKFKDQVTISADKSISTAYLQWSSLKASDTAMYFCAR | |
| 284_FAP- | HGGTGRGAMDYWGQGTLVTVSSASTKGPSVFPLAPSSKSTSGGTAALGC | |
| VH1- | LVKDYFPEPVTVSWNSGALTSGVHTFPAVLQSSGLYSLSSVVTVPSSSL | |
| huIgG1(AAA)_ | GTQTYICNVNHKPSNTKVDKKVEPKSCDKTHTCPPCPAPEAAGGPSVFL | |
| delK- | FPPKPKDTLMISRTPEVTCVVVDVSHEDPEVKFNWYVDGVEVHNAKTKP | |
| GGSPLGLAGGGS | REEQYNSTYRVVSVLTVLHQDWLNGKEYKCKVSNKALAAPIEKTISKAK | |
| GG- | GQPREPQVYTLPPSRDELTKNQVSLTCLVKGFYPSDIAVEWESNGQPEN | |
| L_wt_del_ | NYKTTPPVLDSDGSFFLYSKLTVDKSRWQQGNVFSCSVMHEALHNHYTQ | |
| APASS_F42A- | KSLSLSPGGGSPLGLAGGGSGGSTKKTQLQLEHLLLDLQMILNGINNYK | |
| GGSGGSGRSDN | NPKLTRMLTAKFYMPKKATELKHLQCLEEELKPLEEVLNLAQSKNFHLR | |
| QGGA-R_N27Y | PRDLISNINVIVLELKGSETTFMCEYADETATIVEFLNRWITFSQSIIS | |
| | TLTGGSGGSGRSDN [symbol] GGAELCDDDPPEIPHATFKAMAYKEGTMLYCECK | |
| | RGFRRIKSGSLYMLCTGNSSHSSWDNQCQCTSSATRNTTKQVTPQPEEQ | |
| | KERKTTEMQSPMQPVDQASLPGHCREPPPWENEATERIYHFVVGQMVYY | |
| | QCVQGYRALHRGPAESVCKMTHGKTRWTQPQLICTGE | |
| Chains 3 | DIVMTQTPLSLSVTPGQPASISCRASKSVSTSAYSYMHWYLQKPGQSPQ | 312 |
| and 4: | LLIYLASNLESGVPDRFSGSGSGTDFTLKISRVEAEDVGVYYCQHSREL | |
| 7_FAP-L1- | PYTFGQGTKLEIKRTVAAPSVFIFPPSDEQLKSGTASVVCLLNNFYPRE | |
| huIgkLC | AKVQWKVDNALQSGNSQESVTEQDSKDSTYSLSSTLTLSKADYEKHKVY | |
| | ACEVTHQGLSSPVTKSFNRGEC | |

P22921450 Activatable Proprotein

| | | |
|---|---|---|
| Chains 1 | EVQLVQSGAEVKKPGESLKISCKGSGYTFTENIIHWVRQMPGKGLEWIG | 313 |
| and 2: | WFHPGSGSIKYNEKFKDQVTISADKSISTAYLQWSSLKASDTAMYFCAR | |
| 285_FAP- | HGGTGRGAMDYWGQGTLVTVSSASTKGPSVFPLAPSSKSTSGGTAALGC | |
| VH1- | LVKDYFPEPVTVSWNSGALTSGVHTFPAVLQSSGLYSLSSVVTVPSSSL | |
| huIgG1(AAA)_ | GTQTYICNVNHKPSNTKVDKKVEPKSCDKTHTCPPCPAPEAAGGPSVFL | |
| delK- | FPPKPKDTLMISRTPEVTCVVVDVSHEDPEVKFNWYVDGVEVHNAKTKP | |
| GGSPLGLAGGGS | REEQYNSTYRWSVLTVLHQDWLNGKEYKCKVSNKALAAPIEKTISKAK | |
| GG- | GQPREPQVYTLPPSRDELTKNQVSLTCLVKGFYPSDIAVEWESNGQPEN | |
| L_wt_del_ | NYKTTPPVLDSDGSFFLYSKLTVDKSRWQQGNVFSCSVMHEALHNHYTQ | |
| APASS_F42K- | KSLSLSPGGGSPLGLAGGGSGGSTKKTQLQLEHLLLDLQMILNGINNYK | |
| GGSGGSGRSDN | NPKLTRMLTKKFYMPKKATELKHLQCLEEELKPLEEVLNLAQSKNFHLR | |
| QGGA-R_N27D | PRDLISNINVIVLELKGSETTFMCEYADETATIVEFLNRWITFSQSIIS | |
| | TLTGGSGGSGRSDN [symbol] GGAELCDDDPPEIPHATFKAMAYKEGTMLDCECK | |
| | RGFRRIKSGSLYMLCTGNSSHSSWDNQCQCTSSATRNTTKQVTPQPEEQ | |
| | KERKTTEMQSPMQPVDQASLPGHCREPPPWENEATERIYHFVVGQMVYY | |
| | QCVQGYRALHRGPAESVCKMTHGKTRWTQPQLICTGE | |
| Chains 3 | DIVMTQTPLSLSVTPGQPASISCRASKSVSTSAYSYMHWYLQKPGQSPQ | 314 |
| and 4: | LLIYLASNLESGVPDRFSGSGSGTDFTLKISRVEAEDVGVYYCQHSREL | |
| 7_FAP-L1- | PYTFGQGTKLEIKRTVAAPSVFIFPPSDEQLKSGTASWCLLNNFYPRE | |
| huIgkLC | AKVQWKVDNALQSGNSQESVTEQDSKDSTYSLSSTLTLSKADYEKHKVY | |
| | ACEVTHQGLSSPVTKSFNRGEC | |

P22931450 Activatable Proprotein

| | | |
|---|---|---|
| Chains 1 | EVQLVQSGAEVKKPGESLKISCKGSGYTFTENIIHWVRQMPGKGLEWIG | 315 |
| and 2: | WFHPGSGSIKYNEKFKDQVTISADKSISTAYLQWSSLKASDTAMYFCAR | |
| 286_FAP- | HGGTGRGAMDYWGQGTLVTVSSASTKGPSVFPLAPSSKSTSGGTAALGC | |
| VH1- | LVKDYFPEPVTVSWNSGALTSGVHTFPAVLQSSGLYSLSSVVTVPSSSL | |
| huIgG1(AAA)_ | GTQTYICNVNHKPSNTKVDKKVEPKSCDKTHTCPPCPAPEAAGGPSVFL | |
| delK- | FPPKPKDTLMISRTPEVTCVVVDVSHEDPEVKFNWYVDGVEVHNAKTKP | |
| GGSPLGLAGGGS | REEQYNSTYRVVSVLTVLHQDWLNGKEYKCKVSNKALAAPIEKTISKAK | |
| GG- | GQPREPQVYTLPPSRDELTKNQVSLTCLVKGFYPSDIAVEWESNGQPEN | |
| L_wt_del_ | NYKTTPPVLDSDGSFFLYSKLTVDKSRWQQGNVFSCSVMHEALHNHYTQ | |
| APASS_F42R- | KSLSLSPGGGSPLGLAGGGSGGSTKKTQLQLEHLLLDLQMILNGINNYK | |
| GGSGGSGRSDN | NPKLTRMLTRKFYMPKKATELKHLQCLEEELKPLEEVLNLAQSKNFHLR | |
| QGGA-R_N27D | PRDLISNINVIVLELKGSETTFMCEYADETATIVEFLNRWITFSQSIIS | |
| | TLTGGSGGSGRSDN [symbol] GGAELCDDDPPEIPHATFKAMAYKEGTMLDCECK | |
| | RGFRRIKSGSLYMLCTGNSSHSSWDNQCQCTSSATRNTTKQVTPQPEEQ | |
| | KERKTTEMQSPMQPVDQASLPGHCREPPPWENEATERIYHFVVGQMVYY | |
| | QCVQGYRALHRGPAESVCKMTHGKTRWTQPQLICTGE | |
| Chains 3 | DIVMTQTPLSLSVTPGQPASISCRASKSVSTSAYSYMHWYLQKPGQSPQ | 316 |
| and 4: | LLIYLASNLESGVPDRFSGSGSGTDFTLKISRVEAEDVGVYYCQHSREL | |
| 7_FAP-L1- | PYTFGQGTKLEIKRTVAAPSVFIFPPSDEQLKSGTASVVCLLNNFYPRE | |
| huIgkLC | AKVQWKVDNALQSGNSQESVTEQDSKDSTYSLSSTLTLSKADYEKHKVY | |
| | ACEVTHQGLSSPVTKSFNRGEC | |

P22941450 Activatable Proprotein

| | | |
|---|---|---|
| Chains 1 | EVQLVQSGAEVKKPGESLKISCKGSGYTFTENIIHWVRQMPGKGLEWIG | 317 |
| and 2: | WFHPGSGSIKYNEKFKDQVTISADKSISTAYLQWSSLKASDTAMYFCAR | |
| 287_FAP- | HGGTGRGAMDYWGQGTLVTVSSASTKGPSVFPLAPSSKSTSGGTAALGC | |
| VH1- | LVKDYFPEPVTVSWNSGALTSGVHTFPAVLQSSGLYSLSSVVTVPSSSL | |
| huIgG1(AAA)_ | GTQTYICNVNHKPSNTKVDKKVEPKSCDKTHTCPPCPAPEAAGGPSVFL | |
| delK- | FPPKPKDTLMISRTPEVTCVVVDVSHEDPEVKFNWYVDGVEVHNAKTKP | |
| GGSPLGLAGGGS | REEQYNSTYRVVSVLTVLHQDWLNGKEYKCKVSNKALYAPIEKTISKAK | |
| GG- | GQPREPQVYTLPPSRDELTKNQVSLTCLVKGFYPSDIAVEWESNGQPEN | |
| L_wt_del_ | NYKTTPPVLDSDGSFFLYSKLTVDKSRWQQGNVFSCSVMHEALHNHYTQ | |
| APASS_K35E_ | KSLSLSPGGGSPLGLAGGGSGGSTKKTQLQLEHLLLDLQMILNGINNYK | |
| R38E_F42A_ | NPELTEMLTAKFYMPKKATELKHLQCLEKELKPLEEVLNLAQSKNFHLR | |
| E61K- | PRDLISNINVIVLELKGSETTFMCEYADETATIVEFLNRWITFSQSIIS | |
| GGSGGSGRSDN | TLTGGSGGSGRSDN [symbol] GGAELCKDKPPEIPHATFKAMAYKEGTMLYCECK | |
| QGGA- | RGFRRIESGSLYMLCTGNSSHSSWDNQCQCTSSATRNTTKQVTPQPEEQ | |
| R_D4K_D6K_ | KERKTTEMQSPMQPVDQASLPGHCREPPPWENEATERIYHFVVGQMVYY | |
| N27Y_K38E | QCVQGYRALHRGPAESVCKMTHGKTRWTQPQLICTGE | |
| Chains 3 | DIVMTQTPLSLSVTPGQPASISCRASKSVSTSAYSYMHWYLQKPGQSPQ | 318 |
| and 4: | LLIYLASNLESGVPDRFSGSGSGTDFTLKISRVEAEDVGVYYCQHSREL | |
| 7_FAP-L1- | PYTFGQGTKLEIKRTVAAPSVFIFPPSDEQLKSGTASVVCLLNNFYPRE | |
| huIgkLC | AKVQWKVDNALQSGNSQESVTEQDSKDSTYSLSSTLTLSKADYEKHKVY | |
| | ACEVTHQGLSSPVTKSFNRGEC | |

P22951450 Activatable Proprotein

| | | |
|---|---|---|
| Chains 1 | EVQLVQSGAEVKKPGESLKISCKGSGYTFTENIIHWVRQMPGKGLEWIG | 319 |
| and 2: | WFHPGSGSIKYNEKFKDQVTISADKSISTAYLQWSSLKASDTAMYFCAR | |
| 288_FAP- | HGGTGRGAMDYWGQGTLVTVSSASTKGPSVFPLAPSSKSTSGGTAALGC | |
| VH1- | LVKDYFPEPVTVSWNSGALTSGVHTFPAVLQSSGLYSLSSVVTVPSSSL | |
| huIgG1(AAA)_ | GTQTYICNVNHKPSNTKVDKKVEPKSCDKTHTCPPCPAPEAAGGPSVFL | |
| delK- | FPPKPKDTLMISRTPEVTCVVVDVSHEDPEVKFNWYVDGVEVHNAKTKP | |
| GGSPLGLAGGGS | REEQYNSTYRVVSVLTVLHQDWLNGKEYKCKVSNKALYAPIEKTISKAK | |
| GG- | GQPREPQVYTLPPSRDELTKNQVSLTCLVKGFYPSDIAVEWESNGQPEN | |
| L_wt_del_ | NYKTTPPVLDSDGSFFLYSKLTVDKSRWQQGNVFSCSVMHEALHNHYTQ | |
| APASS_K35E_ | KSLSLSPGGGSPLGLAGGGSGGSTKKTQLQLEHLLLDLQMILNGINNYK | |
| R38E_F42K_ | NPELTEMLTKKFYMPKKATELKHLQCLEKELKPLEEVLNLAQSKNFHLR | |
| E61K- | PRDLISNINVIVLELKGSETTFMCEYADETATIVEFLNRWITFSQSIIS | |
| GGSGGSGRSDN | TLTGGSGGSGRSDN [symbol] GGAELCKDKPPEIPHATFKAMAYKEGTMLDCECK | |
| QGGA- | RGFRRIESGSLYMLCTGNSSHSSWDNQCQCTSSATRNTTKQVTPQPEEQ | |
| R_D4K_D6K_ | KERKTTEMQSPMQPVDQASLPGHCREPPPWENEATERIYHFVVGQMVYY | |
| N27D_K38E | QCVQGYRALHRGPAESVCKMTHGKTRWTQPQLICTGE | |
| Chains 3 | DIVMTQTPLSLSVTPGQPASISCRASKSVSTSAYSYMHWYLQKPGQSPQ | 320 |
| and 4: | LLIYLASNLESGVPDRFSGSGSGTDFTLKISRVEAEDVGVYYCQHSREL | |
| 7_FAP-L1- | PYTFGQGTKLEIKRTVAAPSVFIFPPSDEQLKSGTASWCLLNNFYPRE | |
| huIgkLC | AKVQWKVDNALQSGNSQESVTEQDSKDSTYSLSSTLTLSKADYEKHKVY | |
| | ACEVTHQGLSSPVTKSFNRGEC | |

P23022158 Activatable Proprotein

| | | |
|---|---|---|
| Chains 1 | QVQLVQSGAEVKKPGASVKVSCKASGYTFTENIIHWVRQAPGQGLEWMG | 321 |
| and 2: | WIHPGSGSIKYAQKLQGRVTMTTDTSTSTAYMELRSLRSDDTAVYYCAR | |
| 289_FAP- | HGGTGRGAMDYWGQGTLVTVSSASTKGPSVFPLAPSSKSTSGGTAALGC | |
| VH6- | LVKDYFPEPVTVSWNSGALTSGVHTFPAVLQSSGLYSLSSVVTVPSSSL | |
| huIgGl_delK | GTQTYICNVNHKPSNTKVDKKVEPKSCDKTHTCPPCPAPELLGGPSVFL | |
| GGSPLGLAGGG | FPPKPKDTLMISRTPEVTCVVVDVSHEDPEVKFNWYVDGVEVHNAKTKP | |
| S GG- | REEQYNSTYRVVSVLTVLHQDWLNGKEYKCKVSNKALPAPIEKTISKAK | |
| L_wt_del_AP | GQPREPQVYTLPPSRDELTKNQVSLTCLVKGFYPSDIAVEWESNGQPEN | |
| ASS_R38D_K4 | NYKTTPPVLDSDGSFFLYSKLTVDKSRWQQGNVFSCSVMHEALHNHYTQ | |
| 3E- | KSLSLSPGGGSPLGLAGGGSGGSTKKTQLQLEHLLLDLQMILNGINNYK | |
| GGSGGSGRSDN | NPKLTDMLTFEFYMPKKATELKHLQCLEEELKPLEEVLNLAQSKNFHLR | |
| QGGA- | PRDLISNINVIVLELKGSETTFMCEYADETATIVEFLNRWITFSQSIIS | |
| R_D6R_E29K | TLTGGSGGSGRSDN [symbol] GGAELCDDRPPEIPHATFKAMAYKEGTMLNCKCK | |
| | RGFRRIKSGSLYMLCTGNSSHSSWDNQCQCTSSATRNTTKQVTPQPEEQ | |
| | KERKTTEMQSPMQPVDQASLPGHCREPPPWENEATERIYHFVVGQMVYY | |
| | QCVQGYRALHRGPAESVCKMTHGKTRWTQPQLICTGE | |
| Chains 3 | EIVLTQSPGTLSLSPGERATLSCRASQSVSTSAYSYMHWYQQKPGQAPR | 322 |
| and 4: | LLIYLASNLESGIPDRFSGSGSGTDFTLTISRLEPEDFAVYYCQQSREL | |
| FAP-L7- | PYTFGQGTKLEIKRTVAAPSVFIFPPSDEQLKSGTASWCLLNNFYPRE | |
| huIgkLC | AKVQWKVDNALQSGNSQESVTEQDSKDSTYSLSSTLTLSKADYEKHKVY | |
| | ACEVTHQGLSSPVTKSFNRGEC | |

P23032158 Protein

| | | |
|---|---|---|
| Chains 1 | QVQLVQSGAEVKKPGASVKVSCKASGYTFTENIIHWVRQAPGQGLEWMG | 323 |
| and 2: | WIHPGSGSIKYAQKLQGRVTMTTDTSTSTAYMELRSLRSDDTAVYYCAR | |
| 290_FAP- | HGGTGRGAMDYWGQGTLVTVSSASTKGPSVFPLAPSSKSTSGGTAALGC | |
| VH6- | LVKDYFPEPVTVSWNSGALTSGVHTFPAVLQSSGLYSLSSVVTVPSSSL | |
| huIgGl_delK | GTQTYICNVNHKPSNTKVDKKVEPKSCDKTHTCPPCPAPELLGGPSVFL | |
| GGSGGSGGSGG | FPPKPKDTLMISRTPEVTCVVVDVSHEDPEVKFNWYVDGVEVHNAKTKP | |
| S GG- | REEQYNSTYRVVSVLTVLHQDWLNGKEYKCKVSNKALPAPIEKTISKAK | |
| L_wt_del_AP | GQPREPQVYTLPPSRDELTKNQVSLTCLVKGFYPSDIAVEWESNGQPEN | |
| ASS_R38D_K4 | NYKTTPPVLDSDGSFFLYSKLTVDKSRWQQGNVFSCSVMHEALHNHYTQ | |
| 3E- | KSLSLSPGGGSGGSGGSGGSGGSTKKTQLQLEHLLLDLQMILNGINNYK | |
| GGSGGSGGSGG | NPKLTDMLTFEFYMPKKATELKHLQCLEEELKPLEEVLNLAQSKNFHLR | |
| SGGA- | PRDLISNINVIVLELKGSETTFMCEYADETATIVEFLNRWITFSQSIIS | |
| R_D6R_E29K | TLTGGSGGSGGSGGSGGAELCDDRPPEIPHATFKAMAYKEGTMLNCKCK | |
| | RGFRRIKSGSLYMLCTGNSSHSSWDNQCQCTSSATRNTTKQVTPQPEEQ | |
| | KERKTTEMQSPMQPVDQASLPGHCREPPPWENEATERIYHFVVGQMVYY | |
| | QCVQGYRALHRGPAESVCKMTHGKTRWTQPQLICTGE | |
| Chains 3 | EIVLTQSPGTLSLSPGERATLSCRASQSVSTSAYSYMHWYQQKPGQAPR | 324 |
| and 4: | LLIYLASNLESGIPDRFSGSGSGTDFTLTISRLEPEDFAVYYCQQSREL | |
| FAP-L7- | PYTFGQGTKLEIKRTVAAPSVFIFPPSDEQLKSGTASVVCLLNNFYPRE | |
| huIgkLC | AKVQWKVDNALQSGNSQESVTEQDSKDSTYSLSSTLTLSKADYEKHKVY | |
| | ACEVTHQGLSSPVTKSFNRGEC | |

P23042158 Activatable Proprotein

| | | |
|---|---|---|
| Chains 1 | QVQLVQSGAEVKKPGASVKVSCKASGYTFTENIIHWVRQAPGQGLEWMG | 325 |
| and 2: | WIHPGSGSIKYAQKLQGRVTMTTDTSTSTAYMELRSLRSDDTAVYYCAR | |
| 291_FAP- | HGGTGRGAMDYWGQGTLVTVSSASTKGPSVFPLAPSSKSTSGGTAALGC | |
| VH6- | LVKDYFPEPVTVSWNSGALTSGVHTFPAVLQSSGLYSLSSVVTVPSSSL | |
| huIgG1_delK- | GTQTYICNVNHKPSNTKVDKKVEPKSCDKTHTCPPCPAPELLGGPSVFL | |
| GGSPLGLAGGGS | FPPKPKDTLMISRTPEVTCVVVDVSHEDPEVKFNWYVDGVEVHNAKTKP | |
| GG- | REEQYNSTYRVVSVLTVLHQDWLNGKEYKCKVSNKALPAPIEKTISKAK | |
| L_wt_del_ | GQPREPQVYTLPPSRDELTKNQVSLTCLVKGFYPSDIAVEWESNGQPEN | |
| APASS_F42A_ | NYKTTPPVLDSDGSFFLYSKLTVDKSRWQQGNVFSCSVMHEALHNHYTQ | |
| R38D_K43E- | KSLSLSPGGGSPLGLAGGGSGGSTKKTQLQLEHLLLDLQMILNGINNYK | |
| GGSGGSGRSDN | NPKLTDMLTAEFYMPKKATELKHLQCLEEELKPLEEVLNLAQSKNFHLR | |
| QGGA- | PRDLISNINVIVLELKGSETTFMCEYADETATIVEFLNRWITFSQSIIS | |
| R_D6R_E29K | TLTGGSGGSGRSDN [symbol] GGAELCDDRPPEIPHATFKAMAYKEGTMLNCKCK | |
| | RGFRRIKSGSLYMLCTGNSSHSSWDNQCQCTSSATRNTTKQVTPQPEEQ | |
| | KERKTTEMQSPMQPVDQASLPGHCREPPPWENEATERIYHFVVGQMVYY | |
| | QCVQGYRALHRGPAESVCKMTHGKTRWTQPQLICTGE | |
| Chains 3 | EIVLTQSPGTLSLSPGERATLSCRASQSVSTSAYSYMHWYQQKPGQAPR | 326 |
| and 4: | LLIYLASNLESGIPDRFSGSGSGTDFTLTISRLEPEDFAVYYCQQSREL | |
| FAP-L7- | PYTFGQGTKLEIKRTVTkAPSVFIFPPSDEQLKSGTASWCLLNNFYPRE | |
| huIgkLC | AKVQWKVDNALQSGNSQESVTEQDSKDSTYSLSSTLTLSKADYEKHKVY | |
| | ACEVTHQGLSSPVTKSFNRGEC | |

P23052158 Protein

| | | |
|---|---|---|
| Chains 1 | QVQLVQSGAEVKKPGASVKVSCKASGYTFTENIIHWVRQAPGQGLEWMG | 327 |
| and 2: | WIHPGSGSIKYAQKLQGRVTMTTDTSTSTAYMELRSLRSDDTAVYYCAR | |
| 292_FAP- | HGGTGRGAMDYWGQGTLVTVSSASTKGPSVFPLAPSSKSTSGGTAALGC | |
| VH6- | LVKDYFPEPVTVSWNSGALTSGVHTFPAVLQSSGLYSLSSVVTVPSSSL | |
| huIgG1_delK- | GTQTYICNVNHKPSNTKVDKKVEPKSCDKTHTCPPCPAPELLGGPSVFL | |
| GGSGGSGGSGGS | FPPKPKDTLMISRTPEVTCVVVDVSHEDPEVKFNWYVDGVEVHNAKTKP | |
| GG- | REEQYNSTYRVVSVLTVLHQDWLNGKEYKCKVSNKALPAPIEKTISKAK | |
| L_wt_del_ | GQPREPQVYTLPPSRDELTKNQVSLTCLVKGFYPSDIAVEWESNGQPEN | |
| APASS_F42A_ | NYKTTPPVLDSDGSFFLYSKLTVDKSRWQQGNVFSCSVMHEALHNHYTQ | |
| R38D_K43E- | KSLSLSPGGGSGGSGGSGGSGGSTKKTQLQLEHLLLDLQMILNGINNYK | |
| GGSGGSGGSGG | NPKLTDMLTAEFYMPKKATELKHLQCLEEELKPLEEVLNLAQSKNFHLR | |
| SGGA- | PRDLISNINVIVLELKGSETTFMCEYADETATIVEFLNRWITFSQSIIS | |
| R_D6R_E29K | TLTGGSGGSGGSGGSGGAELCDDRPPEIPHATFKAMAYKEGTMLNCKCK | |
| | RGFRRIKSGSLYMLCTGNSSHSSWDNQCQCTSSATRNTTKQVTPQPEEQ | |
| | KERKTTEMQSPMQPVDQASLPGHCREPPPWENEATERIYHFVVGQMVYY | |
| | QCVQGYRALHRGPAESVCKMTHGKTRWTQPQLICTGE | |
| Chains 3 | EIVLTQSPGTLSLSPGERATLSCRASQSVSTSAYSYMHWYQQKPGQAPR | 328 |
| and 4: | LLIYLASNLESGIPDRFSGSGSGTDFTLTISRLEPEDFAVYYCQQSREL | |
| FAP-L7- | PYTFGQGTKLEIKRTVAAPSVFIFPPSDEQLKSGTASVVCLLNNFYPRE | |
| huIgkLC | AKVQWKVDNALQSGNSQESVTEQDSKDSTYSLSSTLTLSKADYEKHKVY | |
| | ACEVTHQGLSSPVTKSFNRGEC | |

P23062158 Activatable Proprotein

| | | |
|---|---|---|
| Chains 1 | QVQLVQSGAEVKKPGASVKVSCKASGYTFTENIIHWVRQAPGQGLEWMG | 329 |
| and 2: | WIHPGSGSIKYAQKLQGRVTMTTDTSTSTAYMELRSLRSDDTAVYYCAR | |
| 293_FAP- | HGGTGRGAMDYWGQGTLVTVSSASTKGPSVFPLAPSSKSTSGGTAALGC | |
| VH6- | LVKDYFPEPVTVSWNSGALTSGVHTFPAVLQSSGLYSLSSVVTVPSSSL | |
| huIgG1_delK- | GTQTYICNVNHKPSNTKVDKKVEPKSCDKTHTCPPCPAPELLGGPSVFL | |
| GGSPLGLAGGGS | FPPKPKDTLMISRTPEVTCVVVDVSHEDPEVKFNWYVDGVEVHNAKTKP | |
| GG- | REEQYNSTYRVVSVLTVLHQDWLNGKEYKCKVSNKALPAPIEKTISKAK | |
| L_wt_del_ | GQPREPQVYTLPPSRDELTKNQVSLTCLVKGFYPSDIAVEWESNGQPEN | |
| APASS_E61K_ | NYKTTPPVLDSDGSFFLYSKLTVDKSRWQQGNVFSCSVMHEALHNHYTQ | |
| K43E- | KSLSLSPGGGSPLGLAGGGSGGSTKKTQLQLEHLLLDLQMILNGINNYK | |
| GGSGGSGRSDN | NPKLTRMLTFEFYMPKKATELKHLQCLEKELKPLEEVLNLAQSKNFHLR | |
| QGGA- | PRDLISNINVIVLELKGSETTFMCEYADETATIVEFLNRWITFSQSIIS | |
| R_K38E_E29K | TLTGGSGGSGRSDN [symbol] GGAELCDDDPPEIPHATFKAMAYKEGTMLNCKCK | |
| | RGFRRIESGSLYMLCTGNSSHSSWDNQCQCTSSATRNTTKQVTPQPEEQ | |
| | KERKTTEMQSPMQPVDQASLPGHCREPPPWENEATERIYHFVVGQMVYY | |
| | QCVQGYRALHRGPAESVCKMTHGKTRWTQPQLICTGE | |
| Chains 3 | EIVLTQSPGTLSLSPGERATLSCRASQSVSTSAYSYMHWYQQKPGQAPR | 330 |
| and 4: | LLIYLASNLESGIPDRFSGSGSGTDFTLTISRLEPEDFAVYYCQQSREL | |
| FAP-L7- | PYTFGQGTKLEIKRTVAAPSVFIFPPSDEQLKSGTASVVCLLNNFYPRE | |
| huIgkLC | AKVQWKVDNALQSGNSQESVTEQDSKDSTYSLSSTLTLSKADYEKHKVY | |
| | ACEVTHQGLSSPVTKSFNRGEC | |

P23072158 Protein

| | | |
|---|---|---|
| Chains 1 | QVQLVQSGAEVKKPGASVKVSCKASGYTFTENIIHWVRQAPGQGLEWMG | 331 |
| and 2: | WIHPGSGSIKYAQKLQGRVTMTTDTSTSTAYMELRSLRSDDTAVYYCAR | |
| 294_FAP- | HGGTGRGAMDYWGQGTLVTVSSASTKGPSVFPLAPSSKSTSGGTAALGC | |
| VH6- | LVKDYFPEPVTVSWNSGALTSGVHTFPAVLQSSGLYSLSSVVTVPSSSL | |
| huIgG1_delK- | GTQTYICNVNHKPSNTKVDKKVEPKSCDKTHTCPPCPAPELLGGPSVFL | |
| GGSGGSGGSGGS | FPPKPKDTLMISRTPEVTCVVVDVSHEDPEVKFNWYVDGVEVHNAKTKP | |
| GG- | REEQYNSTYRVVSVLTVLHQDWLNGKEYKCKVSNKALPAPIEKTISKAK | |
| L_wt_del_ | GQPREPQVYTLPPSRDELTKNQVSLTCLVKGFYPSDIAVEWESNGQPEN | |
| APASS_E61K_ | NYKTTPPVLDSDGSFFLYSKLTVDKSRWQQGNVFSCSVMHEALHNHYTQ | |
| K43E- | KSLSLSPGGGSGGSGGSGGSGGSTKKTQLQLEHLLLDLQMILNGINNYK | |
| GGSGGSGGSGG | NPKLTRMLTFEFYMPKKATELKHLQCLEKELKPLEEVLNLAQSKNFHLR | |
| SGGA- | PRDLISNINVIVLELKGSETTFMCEYADETATIVEFLNRWITFSQSIIS | |
| R_K38E_E29K | TLTGGSGGSGGSGGSGGAELCDDDPPEIPHATFKAMAYKEGTMLNCKCK | |
| | RGFRRIESGSLYMLCTGNSSHSSWDNQCQCTSSATRNTTKQVTPQPEEQ | |
| | KERKTTEMQSPMQPVDQASLPGHCREPPPWENEATERIYHFVVGQMVYY | |
| | QCVQGYRALHRGPAESVCKMTHGKTRWTQPQLICTGE | |
| Chains 3 | EIVLTQSPGTLSLSPGERATLSCRASQSVSTSAYSYMHWYQQKPGQAPR | 332 |
| and 4: | LLIYLASNLESGIPDRFSGSGSGTDFTLTISRLEPEDFAVYYCQQSREL | |
| FAP-L7- | PYTFGQGTKLEIKRTVAAPSVFIFPPSDEQLKSGTASWCLLNNFYPRE | |
| huIgkLC | AKVQWKVDNALQSGNSQESVTEQDSKDSTYSLSSTLTLSKADYEKHKVY | |
| | ACEVTHQGLSSPVTKSFNRGEC | |

P23082158 Activatable Proprotein

| | | |
|---|---|---|
| Chains 1 | QVQLVQSGAEVKKPGASVKVSCKASGYTFTENIIHWVRQAPGQGLEWMG | 333 |
| and 2: | WIHPGSGSIKYAQKLQGRVTMTTDTSTSTAYMELRSLRSDDTAVYYCAR | |
| 295_FAP- | HGGTGRGAMDYWGQGTLVTVSSASTKGPSVFPLAPSSKSTSGGTAALGC | |
| VH6- | LVKDYFPEPVTVSWNSGALTSGVHTFPAVLQSSGLYSLSSVVTVPSSSL | |
| huIgG1_delK- | GTQTYICNVNHKPSNTKVDKKVEPKSCDKTHTCPPCPAPELLGGPSVFL | |
| GGSPLGLAGGGS | FPPKPKDTLMISRTPEVTCVVVDVSHEDPEVKFNWYVDGVEVHNAKTKP | |
| GG- | REEQYNSTYRVVSVLTVLHQDWLNGKEYKCKVSNKALPAPIEKTISKAK | |
| L_wt_del_ | GQPREPQVYTLPPSRDELTKNQVSLTCLVKGFYPSDIAVEWESNGQPEN | |
| APASS_F42A_ | NYKTTPPVLDSDGSFFLYSKLTVDKSRWQQGNVFSCSVMHEALHNHYTQ | |
| E61K_K43E- | KSLSLSPGGGSPLGLAGGGSGGSTKKTQLQLEHLLLDLQMILNGINNYK | |
| GGSGGSGRSDN | NPKLTRMLTAEFYMPKKATELKHLQCLEKELKPLEEVLNLAQSKNFHLR | |
| QGGA- | PRDLISNINVIVLELKGSETTFMCEYADETATIVEFLNRWITFSQSIIS | |
| R_K38E_E29K | TLTGGSGGSGRSDN [symbol] GGAELCDDDPPEIPHATFKAMAYKEGTMLNCKCK | |
| | RGFRRIESGSLYMLCTGNSSHSSWDNQCQCTSSATRNTTKQVTPQPEEQ | |
| | KERKTTEMQSPMQPVDQASLPGHCREPPPWENEATERIYHFVVGQMVYY | |
| | QCVQGYRALHRGPAESVCKMTHGKTRWTQPQLICTGE | |
| Chains 3 | EIVLTQSPGTLSLSPGERATLSCRASQSVSTSAYSYMHWYQQKPGQAPR | 334 |
| and 4: | LLIYLASNLESGIPDRFSGSGSGTDFTLTISRLEPEDFAVYYCQQSREL | |
| FAP-L7- | PYTFGQGTKLEIKRTVAAPSVFIFPPSDEQLKSGTASVVCLLNNFYPRE | |
| huIgkLC | AKVQWKVDNALQSGNSQESVTEQDSKDSTYSLSSTLTLSKADYEKHKVY | |
| | ACEVTHQGLSSPVTKSFNRGEC | |

P23092158 Protein

| | | |
|---|---|---|
| Chains 1 | QVQLVQSGAEVKKPGASVKVSCKASGYTFTENIIHWVRQAPGQGLEWMG | 335 |
| and 2: | WIHPGSGSIKYAQKLQGRVTMTTDTSTSTAYMELRSLRSDDTAVYYCAR | |
| 296_FAP- | HGGTGRGAMDYWGQGTLVTVSSASTKGPSVFPLAPSSKSTSGGTAALGC | |
| VH6- | LVKDYFPEPVTVSWNSGALTSGVHTFPAVLQSSGLYSLSSVVTVPSSSL | |
| huIgG1_delK- | GTQTYICNVNHKPSNTKVDKKVEPKSCDKTHTCPPCPAPELLGGPSVFL | |
| GGSGGSGGSGGS | FPPKPKDTLMISRTPEVTCVVVDVSHEDPEVKFNWYVDGVEVHNAKTKP | |
| GG- | REEQYNSTYRVVSVLTVLHQDWLNGKEYKCKVSNKALPAPIEKTISKAK | |
| L_wt_del_ | GQPREPQVYTLPPSRDELTKNQVSLTCLVKGFYPSDIAVEWESNGQPEN | |
| APASS_F42A_ | NYKTTPPVLDSDGSFFLYSKLTVDKSRWQQGNVFSCSVMHEALHNHYTQ | |
| E61K_K43E- | KSLSLSPGGGSGGSGGSGGSGGSTKKTQLQLEHLLLDLQMILNGINNYK | |
| GGSGGSGGSGG | NPKLTRMLTAEFYMPKKATELKHLQCLEKELKPLEEVLNLAQSKNFHLR | |
| SGGA- | PRDLISNINVIVLELKGSETTFMCEYADETATIVEFLNRWITFSQSIIS | |
| R_K38E_E29K | TLTGGSGGSGGSGGSGGAELCDDDPPEIPHATFKAMAYKEGTMLNCKCK | |
| | RGFRRIESGSLYMLCTGNSSHSSWDNQCQCTSSATRNTTKQVTPQPEEQ | |
| | KERKTTEMQSPMQPVDQASLPGHCREPPPWENEATERIYHFWGQMVYY | |
| | QCVQGYRALHRGPAESVCKMTHGKTRWTQPQLICTGE | |
| Chains 3 | EIVLTQSPGTLSLSPGERATLSCRASQSVSTSAYSYMHWYQQKPGQAPR | 336 |
| and 4: | LLIYLASNLESGIPDRFSGSGSGTDFTLTISRLEPEDFAVYYCQQSREL | |
| FAP-L7- | PYTFGQGTKLEIKRTVTkAPSVFIFPPSDEQLKSGTASWCLLNNFYPRE | |
| huIgkLC | AKVQWKVDNALQSGNSQESVTEQDSKDSTYSLSSTLTLSKADYEKHKVY | |
| | ACEVTHQGLSSPVTKSFNRGEC | |

P23102158 Protein

| | | |
|---|---|---|
| Chains 1 | QVQLVQSGAEVKKPGASVKVSCKASGYTFTENIIHWVRQAPGQGLEWMG | 337 |
| and 2: | WIHPGSGSIKYAQKLQGRVTMTTDTSTSTAYMELRSLRSDDTAVYYCAR | |
| 297_FAP- | HGGTGRGAMDYWGQGTLVTVSSASTKGPSVFPLAPSSKSTSGGTAALGC | |
| VH6- | LVKDYFPEPVTVSWNSGALTSGVHTFPAVLQSSGLYSLSSVVTVPSSSL | |
| huIgG1_delK- | GTQTYICNVNHKPSNTKVDKKVEPKSCDKTHTCPPCPAPELLGGPSVFL | |
| GGSGGSGGSGGS | FPPKPKDTLMISRTPEVTCVWDVSHEDPEVKFNWYVDGVEVHNAKTKP | |
| GG- | REEQYNSTYRWSVLTVLHQDWLNGKEYKCKVSNKALPAPIEKTISKAK | |
| L_wt_del_ | GQPREPQVYTLPPSRDELTKNQVSLTCLVKGFYPSDIAVEWESNGQPEN | |
| APASS_R38D_ | NYKTTPPVLDSDGSFFLYSKLTVDKSRWQQGNVFSCSVMHEALHNHYTQ | |
| K43E- | KSLSLSPGGGSGGSGGSGGSGGSTKKTQLQLEHLLLDLQMILNGINNYK | |
| GGSGGSGGSGG | NPKLTDMLTFEFYMPKKATELKHLQCLEEELKPLEEVLNLAQSKNFHLR | |
| SGGA-R_wt | PRDLISNINVIVLELKGSETTFMCEYADETATIVEFLNRWITFSQSIIS | |
| | TLTGGSGGSGGSGGSGGAELCDDDPPEIPHATFKAMAYKEGTMLNCECK | |
| | RGFRRIKSGSLYMLCTGNSSHSSWDNQCQCTSSATRNTTKQVTPQPEEQ | |
| | KERKTTEMQSPMQPVDQASLPGHCREPPPWENEATERIYHFVVGQMVYY | |
| | QCVQGYRALHRGPAESVCKMTHGKTRWTQPQLICTGE | |
| Chains 3 | EIVLTQSPGTLSLSPGERATLSCRASQSVSTSAYSYMHWYQQKPGQAPR | 338 |
| and 4: | LLIYLASNLESGIPDRFSGSGSGTDFTLTISRLEPEDFAVYYCQQSREL | |
| FAP-L7- | PYTFGQGTKLEIKRTVAAPSVFIFPPSDEQLKSGTASWCLLNNFYPRE | |
| huIgkLC | AKVQWKVDNALQSGNSQESVTEQDSKDSTYSLSSTLTLSKADYEKHKVY | |
| | ACEVTHQGLSSPVTKSFNRGEC | |

P23112158 Protein

| | | |
|---|---|---|
| Chains 1 | QVQLVQSGAEVKKPGASVKVSCKASGYTFTENIIHWVRQAPGQGLEWMG | 339 |
| and 2: | WIHPGSGSIKYAQKLQGRVTMTTDTSTSTAYMELRSLRSDDTAVYYCAR | |
| 298_FAP- | HGGTGRGAMDYWGQGTLVTVSSASTKGPSVFPLAPSSKSTSGGTAALGC | |
| VH6- | LVKDYFPEPVTVSWNSGALTSGVHTFPAVLQSSGLYSLSSVVTVPSSSL | |
| huIgG1_delK- | GTQTYICNVNHKPSNTKVDKKVEPKSCDKTHTCPPCPAPELLGGPSVFL | |
| GGSGGSGGSGGS | FPPKPKDTLMISRTPEVTCVVVDVSHEDPEVKFNWYVDGVEVHNAKTKP | |
| GG- | REEQYNSTYRVVSVLTVLHQDWLNGKEYKCKVSNKALPAPIEKTISKAK | |
| L_wt_del_ | GQPREPQVYTLPPSRDELTKNQVSLTCLVKGFYPSDIAVEWESNGQPEN | |
| APASS_F42A_ | NYKTTPPVLDSDGSFFLYSKLTVDKSRWQQGNVFSCSVMHEALHNHYTQ | |
| R38D_K43E- | KSLSLSPGGGSGGSGGSGGSGGSTKKTQLQLEHLLLDLQMILNGINNYK | |
| GGSGGSGGSGG | NPKLTDMLTAEFYMPKKATELKHLQCLEEELKPLEEVLNLAQSKNFHLR | |
| SGGA-R_wt | PRDLISNINVIVLELKGSETTFMCEYADETATIVEFLNRWITFSQSIIS | |
| | TLTGGSGGSGGSGGSGGAELCDDDPPEIPHATFKAMAYKEGTMLNCECK | |
| | RGFRRIKSGSLYMLCTGNSSHSSWDNQCQCTSSATRNTTKQVTPQPEEQ | |
| | KERKTTEMQSPMQPVDQASLPGHCREPPPWENEATERIYHFVVGQMVYY | |
| | QCVQGYRALHRGPAESVCKMTHGKTRWTQPQLICTGE | |
| Chains 3 | EIVLTQSPGTLSLSPGERATLSCRASQSVSTSAYSYMHWYQQKPGQAPR | 340 |
| and 4: | LLIYLASNLESGIPDRFSGSGSGTDFTLTISRLEPEDFAVYYCQQSREL | |
| FAP-L7- | PYTFGQGTKLEIKRTVAAPSVFIFPPSDEQLKSGTASVVCLLNNFYPRE | |
| huIgkLC | AKVQWKVDNALQSGNSQESVTEQDSKDSTYSLSSTLTLSKADYEKHKVY | |
| | ACEVTHQGLSSPVTKSFNRGEC | |

P23122158 Protein

| | | |
|---|---|---|
| Chains 1 | QVQLVQSGAEVKKPGASVKVSCKASGYTFTENIIHWVRQAPGQGLEWMG | 341 |
| and 2: | WIHPGSGSIKYAQKLQGRVTMTTDTSTSTAYMELRSLRSDDTAVYYCAR | |
| 299_FAP- | HGGTGRGAMDYWGQGTLVTVSSASTKGPSVFPLAPSSKSTSGGTAALGC | |
| VH6- | LVKDYFPEPVTVSWNSGALTSGVHTFPAVLQSSGLYSLSSVVTVPSSSL | |
| huIgG1_delK- | GTQTYICNVNHKPSNTKVDKKVEPKSCDKTHTCPPCPAPELLGGPSVFL | |
| GGSGGSGGSGGS | FPPKPKDTLMISRTPEVTCVVVDVSHEDPEVKFNWYVDGVEVHNAKTKP | |
| GG- | REEQYNSTYRVVSVLTVLHQDWLNGKEYKCKVSNKALPAPIEKTISKAK | |
| L_wt_del_ | GQPREPQVYTLPPSRDELTKNQVSLTCLVKGFYPSDIAVEWESNGQPEN | |
| APASS_E61K_ | NYKTTPPVLDSDGSFFLYSKLTVDKSRWQQGNVFSCSVMHEALHNHYTQ | |
| K43E- | KSLSLSPGGGSGGSGGSGGSGGSTKKTQLQLEHLLLDLQMILNGINNYK | |
| GGSGGSGGSGG | NPKLTRMLTFEFYMPKKATELKHLQCLEKELKPLEEVLNLAQSKNFHLR | |
| SGGA-R_wt | PRDLISNINVIVLELKGSETTFMCEYADETATIVEFLNRWITFSQSIIS | |
| | TLTGGSGGSGGSGGSGGAELCDDDPPEIPHATFKAMAYKEGTMLNCECK | |
| | RGFRRIKSGSLYMLCTGNSSHSSWDNQCQCTSSATRNTTKQVTPQPEEQ | |
| | KERKTTEMQSPMQPVDQASLPGHCREPPPWENEATERIYHFVVGQMVYY | |
| | QCVQGYRALHRGPAESVCKMTHGKTRWTQPQLICTGE | |
| Chains 3 | EIVLTQSPGTLSLSPGERATLSCRASQSVSTSAYSYMHWYQQKPGQAPR | 342 |
| and 4: | LLIYLASNLESGIPDRFSGSGSGTDFTLTISRLEPEDFAVYYCQQSREL | |
| FAP-L7- | PYTFGQGTKLEIKRTVAAPSVFIFPPSDEQLKSGTASVVCLLNNFYPRE | |
| huIgkLC | AKVQWKVDNALQSGNSQESVTEQDSKDSTYSLSSTLTLSKADYEKHKVY | |
| | ACEVTHQGLSSPVTKSFNRGEC | |

P23132158 Protein

| | | |
|---|---|---|
| Chains 1 | QVQLVQSGAEVKKPGASVKVSCKASGYTFTENIIHWVRQAPGQGLEWMG | 343 |
| and 2: | WIHPGSGSIKYAQKLQGRVTMTTDTSTSTAYMELRSLRSDDTAVYYCAR | |
| 300_FAP- | HGGTGRGAMDYWGQGTLVTVSSASTKGPSVFPLAPSSKSTSGGTAALGC | |
| VH6- | LVKDYFPEPVTVSWNSGALTSGVHTFPAVLQSSGLYSLSSVVTVPSSSL | |
| huIgG1_delK- | GTQTYICNVNHKPSNTKVDKKVEPKSCDKTHTCPPCPAPELLGGPSVFL | |
| GGSGGSGGSGGS | FPPKPKDTLMISRTPEVTCVVVDVSHEDPEVKFNWYVDGVEVHNAKTKP | |
| GG- | REEQYNSTYRVVSVLTVLHQDWLNGKEYKCKVSNKALPAPIEKTISKAK | |
| L_wt_del_ | GQPREPQVYTLPPSRDELTKNQVSLTCLVKGFYPSDIAVEWESNGQPEN | |
| APASS_F42A_ | NYKTTPPVLDSDGSFFLYSKLTVDKSRWQQGNVFSCSVMHEALHNHYTQ | |
| E61K_K43E- | KSLSLSPGGGSGGSGGSGGSGGSTKKTQLQLEHLLLDLQMILNGINNYK | |
| GGSGGSGGSGG | NPKLTRMLTAEFYMPKKATELKHLQCLEKELKPLEEVLNLAQSKNFHLR | |
| SGGA-R_wt | PRDLISNINVIVLELKGSETTFMCEYADETATIVEFLNRWITFSQSIIS | |
| | TLTGGSGGSGGSGGSGGAELCDDDPPEIPHATFKAMAYKEGTMLNCECK | |
| | RGFRRIKSGSLYMLCTGNSSHSSWDNQCQCTSSATRNTTKQVTPQPEEQ | |
| | KERKTTEMQSPMQPVDQASLPGHCREPPPWENEATERIYHFVVGQMVYY | |
| | QCVQGYRALHRGPAESVCKMTHGKTRWTQPQLICTGE | |
| Chains 3 | EIVLTQSPGTLSLSPGERATLSCRASQSVSTSAYSYMHWYQQKPGQAPR | 344 |
| and 4: | LLIYLASNLESGIPDRFSGSGSGTDFTLTISRLEPEDFAVYYCQQSREL | |
| FAP-L7- | PYTFGQGTKLEIKRTVAAPSVFIFPPSDEQLKSGTASVVCLLNNFYPRE | |
| huIgkLC | AKVQWKVDNALQSGNSQESVTEQDSKDSTYSLSSTLTLSKADYEKHKVY | |
| | ACEVTHQGLSSPVTKSFNRGEC | |

[0179] Thus, in certain embodiments, an activatable proprotein comprises, consists, or consists essentially of a sequence that is at least 80, 85, 90, 95, 98, or 100% identical to at least one or a combination of sequences selected from Table S5.

[0180] Exemplary FAP antibody sequences are provided in Table S6 below.

TABLE S6
Exemplary FAP antibody sequences

| | | SEQ ID |
|---|---|---|
| Name | Sequence | NO: |
| FAP-VH1 | EVQLVQSGAEVKKPGESLKISCKGSGYTFTEN11HWVRQMPGKGLEWIGW | 345 |
| | FHPGSGSIKYNEKFKDQVTISADKSISTAYLQWSSLKASDTAMYFCARHG | |
| | GTGRGAMDYWGQGTLVTVSS | |
| FAP-VH6 | QVQLVQSGAEVKKPGASVKVSCKASGYTFTENIIHWVRQAPGQGLEWMGW | 346 |
| | IHPGSGSIKYAQKLQGRVTMTTDTSTSTAYMELRSLRSDDTAVYYCARHG | |
| | GTGRGAMDYWGQGTLVTVSS | |
| FAP-VL1 | DIVMTQTPLSLSVTPGQPASISCRASKSVSTSAYSYMHWYLQKPGQSPQL | 347 |
| | LIYLASNLESGVPDRFSGSGSGTDFTLKISRVEAEDVGVYYCQHSRELPY | |
| | TFGQGTKLEIK | |
| FAP-VL7 | EIVLTQSPGTLSLSPGERATLSCRASQSVSTSAYSYMHWYQQKPGQAPRL | 348 |
| | LIYLASNLESGIPDRFSGSGSGTDFTLTISRLEPEDFAVYYCQQSRELPY | |
| | TFGQGTKLEIK | |
| FAP-VL8 | EIVLTQSPGTLSLSPGERATLSCRASQSVSTSAYSYMHWYQQKPGQAPRL | 349 |
| | LIYLASNRETGIPDRFSGSGSGTDFTLTISRLEPEDFAVYYCQQSRELPY | |
| | TFGQGTKLEIK | |
| FAP-VH1- | EVQLVQSGAEVKKPGESLKISCKGSGYTFTENIIHWVRQMPGKGLEWIGW | 350 |
| huIgG1-AAA | FHPGSGSIKYNEKFKDQVTISADKSISTAYLQWSSLKASDTAMYFCARHG | |
| | GTGRGAMDYWGQGTLVTVSSASTKGPSVFPLAPSSKSTSGGTAALGCLVK | |
| | DYFPEPVTVSWNSGALTSGVHTFPAVLQSSGLYSLSSVVTVPSSSLGTQT | |
| | YICNVNHKPSNTKVDKKVEPKSCDKTHTCPPCPAPEAAGGPSVFLFPPKP | |
| | KDTLMISRTPEVTCVVVDVSHEDPEVKFNWYVDGVEVHNAKTKPREEQYN | |
| | STYRVVSVLTVLHQDWLNGKEYKCKVSNKALAAPIEKTISKAKGQPREPQ | |
| | VYTLPPSRDELTKNQVSLTCLVKGFYPSDIAVEWESNGQPENNYKTTPPV | |
| | LDSDGSFFLYSKLTVDKSRWQQGNVFSCSVMHEALHNHYTQKSLSLSPG | |
| FAP-VH6- | QVQLVQSGAEVKKPGASVKVSCKASGYTFTENIIHWVRQAPGQGLEWMGW | 351 |
| huIgG1-AAA | IHPGSGSIKYAQKLQGRVTMTTDTSTSTAYMELRSLRSDDTAVYYCARHG | |
| | GTGRGAMDYWGQGTLVTVSSASTKGPSVFPLAPSSKSTSGGTAALGCLVK | |
| | DYFPEPVTVSWNSGALTSGVHTFPAVLQSSGLYSLSSVVTVPSSSLGTQT | |
| | YICNVNHKPSNTKVDKKVEPKSCDKTHTCPPCPAPEAAGGPSVFLFPPKP | |
| | KDTLMISRTPEVTCVVVDVSHEDPEVKFNWYVDGVEVHNAKTKPREEQYN | |
| | STYRVVSVLTVLHQDWLNGKEYKCKVSNKALAAPIEKTISKAKGQPREPQ | |
| | VYTLPPSRDELTKNQVSLTCLVKGFYPSDIAVEWESNGQPENNYKTTPPV | |
| | LDSDGSFFLYSKLTVDKSRWQQGNVFSCSVMHEALHNHYTQKSLSLSPG | |
| FAP-VL1- | DIQMTQSPSSLSASVGDRVTITCRASQDVNTAVAWYQQKPGKAPKLLIYS | 352 |
| huxLC | ASFLYSGVPSRFSGSRSGTDFTLTISSLQPEDFATYYCQQHYTTPPTFGQ | |
| | GTKVEIKRTVAAPSVFIFPPSDEQLKSGTASVVCLLNNFYPREAKVQWKV | |
| | DNALQSGNSQESVTEQDSKDSTYSLSSTLTLSKADYEKHKVYACEVTHQG | |
| | LSSPVTKSFNRGEC | |
| FAP-VL7- | EIVLTQSPGTLSLSPGERATLSCRASQSVSTSAYSYMHWYQQKPGQAPRL | 353 |
| huxLC | LIYLASNLESGIPDRFSGSGSGTDFTLTISRLEPEDFAVYYCQQSRELPY | |
| | TFGQGTKLEIKRTVAAPSVFIFPPSDEQLKSGTASVVCLLNNFYPREAKV | |
| | QWKVDNALQSGNSQESVTEQDSKDSTYSLSSTLTLSKADYEKHKVYACEV | |
| | THQGLSSPVTKSFNRGEC | |
| FAP-VL8- | EIVLTQSPGTLSLSPGERATLSCRASQSVSTSAYSYMHWYQQKPGQAPRL | 354 |
| huxLC | LIYLASNRETGIPDRFSGSGSGTDFTLTISRLEPEDFAVYYCQQSRELPY | |
| | TFGQGTKLEIKRTVAAPSVFIFPPSDEQLKSGTASVVCLLNNFYPREAKV | |
| | QWKVDNALQSGNSQESVTEQDSKDSTYSLSSTLTLSKADYEKHKVYACEV | |
| | THQGLSSPVTKSFNRGEC | |

[0181] Thus, in certain embodiments, an activatable proprotein comprises, consists, or consists essentially of a sequence that is at least 80, 85, 90, 95, 98, or 100% identical to at least one or a combination of sequences selected from Table S6, for example, a combination of VL (variable light chain) and VH (variable heavy chain) sequences. Certain embodiments include an antibody, or an antigen binding fragment thereof, which specifically binds to human FAP (Fibroblast Activation Protein-α), and which comprises a VL sequence and a VH sequence selected from Table S6, including variants thereof that are at least 80, 85, 90, 95, 98, or 100% identical to the VL and VH sequence.

### Methods of Use and Pharmaceutical Compositions

[0182] Certain embodiments include methods of treating, ameliorating the symptoms of, and/or reducing the progression of, a disease or condition in a subject in need thereof, comprising administering to the subject at least one activatable proprotein, as described herein. Also included are methods of enhancing an immune response in a subject comprising administering to the subject at least one activatable proprotein, as described herein. In particular embodiments, the disease is selected from one or more of a cancer, a viral infection, and an immune disorder.

[0183] In some embodiments, following administration, the activatable proprotein is activated through protease cleavage in a cell or tissue, which releases or opens the homodimer, exposes the binding site of the IL-2 proteins that binds to the IL-2Rβ/γc chain present on the surface of the immune cell in vitro or in vivo, and thereby generates an activated protein (see, for example, FIGS. 4A-4b). In particular embodiments, the protease cleavage occurs in a cancer cell or cancer tissue, or a virally-infected cell or virally-infected tissue. Typically, the activated protein has at least one immune-stimulating IL-2 activity, for example, by binding to the IL-2Rβ/γc chain present on the surface of an immune cell in vivo, and thereby stimulating the immune cell. In particular embodiments, the immune cell is selected from one or more of a T cell, a B cell, a natural killer cell, a monocyte, and a macrophage.

[0184] In some embodiments, administration and activation of the activatable proprotein, to generate an activated protein, increases an immune response in the subject by about or at least about 5, 10, 15, 20, 25, 30, 35, 40, 45, 50, 60, 70, 80, 90, 100, 200, 300, 400, 500, 600, 700, 800, 900, 1000, 2000% or more, relative to a control. In some instances, the immune response is an anti-cancer or anti-viral immune response. In some embodiments, administration and activation of the activatable proprotein, to generate an activated protein, increases cell-killing in the subject by about or at least about 5, 10, 15, 20, 25, 30, 35, 40, 45, 50, 60, 70, 80, 90, 100, 200, 300, 400, 500, 600, 700, 800, 900, 1000, 2000% or more, relative to a control. In some embodiments, wherein the cell-killing is cancer cell-killing or virally-infected cell-killing.

[0185] In some embodiments, administration and activation of the activatable proprotein, to generate an activated protein, does not significantly increase binding of the activated protein to the IL-2Rα/β/γc chain expressed on regulatory T cells (T_{regs}). For example, in certain activated proteins, the binding between the IL-2 protein and the IL-2 binding protein (for example, disulfide binding between the IL-2 protein and the IL-2Rα protein) is maintained following linker cleavage, masks the binding site of the IL-2 protein that binds to the IL-2Rα/β/γc chain expressed on T_{regs}, and thereby interferes with binding of the activated protein to T_{regs}. Thus, in certain embodiments, the activated protein does not significantly stimulate or enhance the proliferation and/or activation of (T_{regs}), relative to the activatable proprotein.

[0186] In some embodiments, the disease is a cancer, that is, the subject in need thereof has or is suspected of having a cancer. Certain embodiments thus include methods of treating, ameliorating the symptoms of, or inhibiting the progression of, a cancer in a subject in need thereof, comprising administering to the subject at least one activatable proprotein, as described herein. In particular embodiments, the cancer is a primary cancer or a metastatic cancer. In specific embodiments, the cancer is selected from one or more of melanoma (optionally metastatic melanoma), kidney cancer (optionally renal cell carcinoma), pancreatic cancer, bone cancer, prostate cancer, small cell lung cancer, non-small cell lung cancer (NSCLC), mesothelioma, leukemia (optionally lymphocytic leukemia, chronic myelogenous leukemia, acute myeloid leukemia, or relapsed acute myeloid leukemia), multiple myeloma, lymphoma, hepatoma (hepatocellular carcinoma), sarcoma, B-cell malignancy, breast cancer, ovarian cancer, colorectal cancer, glioma, glioblastoma multiforme, meningioma, pituitary adenoma, vestibular schwannoma, primary CNS lymphoma, primitive neuroectodermal tumor (medulloblastoma), bladder cancer, uterine cancer, esophageal cancer, brain cancer, head and neck cancers, cervical cancer, testicular cancer, thyroid cancer, and stomach cancer

[0187] In some embodiments, as noted above, the cancer is a metastatic cancer. Further to the above cancers, exemplary metastatic cancers include, without limitation, bladder cancers which have metastasized to the bone, liver, and/or lungs; breast cancers which have metastasized to the bone, brain, liver, and/or lungs; colorectal cancers which have metastasized to the liver, lungs, and/or peritoneum; kidney cancers which have metastasized to the adrenal glands, bone, brain, liver, and/or lungs; lung cancers which have metastasized to the adrenal glands, bone, brain, liver, and/or other lung sites; melanomas which have metastasized to the bone, brain, liver, lung, and/or skin/muscle; ovarian cancers which have metastasized to the liver, lung, and/or peritoneum; pancreatic cancers which have metastasized to the liver, lung, and/or peritoneum; prostate cancers which have metastasized to the adrenal glands, bone, liver, and/or lungs; stomach cancers which have metastasized to the liver, lung, and/or peritoneum; thyroid cancers which have metastasized to the bone, liver, and/or lungs; and uterine cancers which have metastasized to the bone, liver, lung, peritoneum, and/or vagina; among others.

[0188] The methods for treating cancers can be combined with other therapeutic modalities. For example, a combination therapy described herein can be administered to a subject before, during, or after other therapeutic interventions, including symptomatic care, radiotherapy, surgery, transplantation, hormone therapy, photodynamic therapy, antibiotic therapy, or any combination thereof. Symptomatic care includes administration of corticosteroids, to reduce cerebral edema, headaches, cognitive dysfunction, and emesis, and administration of anti-convulsants, to reduce seizures. Radiotherapy includes whole-brain irradiation, fractionated radiotherapy, and radiosurgery, such as stereotactic radiosurgery, which can be further combined with traditional surgery.

[0189] Certain embodiments thus include combination therapies for treating cancers, including methods of treating ameliorating the symptoms of, or inhibiting the progression of, a cancer in a subject in need thereof, comprising administering to the subject at least one activatable proprotein described herein in combination with at least one additional agent, for example, a chemotherapeutic agent, a hormonal therapeutic agent, and/or a kinase inhibitor. In some embodiments, administering the at least one activatable proprotein enhances the susceptibility of the cancer to the additional agent (for example, chemotherapeutic agent, hormonal therapeutic agent, and or kinase inhibitor) by about or at least about 5, 10, 15, 20, 25, 30, 35, 40, 45, 50, 60, 70, 80, 90, 100, 200, 300, 400, 500, 600, 700, 800, 900, 1000, 2000% or more relative to the additional agent alone.

[0190] Certain combination therapies employ one or more chemotherapeutic agents, for example, small molecule chemotherapeutic agents. Non-limiting examples of chemotherapeutic agents include alkylating agents, anti-metabolites, cytotoxic antibiotics, topoisomerase inhibitors (type 1 or type II), an anti-microtubule agents, among others.

[0191] Examples of alkylating agents include nitrogen mustards (e.g., mechlorethamine, cyclophosphamide, mustine, melphalan, chlorambucil, ifosfamide, and busulfan), nitrosoureas (e.g., N-Nitroso-N-methylurea (MNU), carmustine (BCNU), lomustine (CCNU), semustine (MeCCNU), fotemustine, and streptozotocin), tetrazines (e.g., dacarbazine, mitozolomide, and temozolomide), aziridines (e.g., thiotepa, mytomycin, and diaziquone (AZQ)), cisplatins and derivatives thereof (e.g., carboplatin and oxaliplatin), and non-classical alkylating agents (optionally procarbazine and hexamethylmelamine).

[0192] Examples of anti-metabolites include anti-folates (e.g., methotrexate and pemetrexed), fluoropyrimidines (e.g., 5-fluorouracil and capecitabine), deoxynucleoside analogues (e.g., ancitabine, enocitabine, cytarabine, gemcitabine, decitabine, azacitidine, fludarabine, nelarabine, cladribine, clofarabine, fludarabine, and pentostatin), and thiopurines (e.g., thioguanine and mercaptopurine);

[0193] Examples of cytotoxic antibiotics include anthracyclines (e.g., doxorubicin, daunorubicin, epirubicin, idarubicin, pirarubicin, aclarubicin, and mitoxantrone), bleomycins, mitomycin C, mitoxantrone, and actinomycin. Examples of topoisomerase inhibitors include camptothecin, irinotecan, topotecan, etoposide, doxorubicin, mitoxantrone, teniposide, novobiocin, merbarone, and aclarubicin.

[0194] Examples of anti-microtubule agents include taxanes (e.g., paclitaxel and docetaxel) and vinca alkaloids (e.g., vinblastine, vincristine, vindesine, vinorelbine).

[0195] The skilled artisan will appreciate that the various chemotherapeutic agents described herein can be combined with any one or more of the activatable proproteins described herein, and used according to any one or more of the methods or compositions described herein.

[0196] Certain combination therapies employ at least one hormonal therapeutic agent. General examples of hormonal therapeutic agents include hormonal agonists and hormonal antagonists. Particular examples of hormonal agonists include progestogen (progestin), corticosteroids (e.g., prednisolone, methylprednisolone, dexamethasone), insulin like growth factors, VEGF derived angiogenic and lymphangiogenic factors (e.g., VEGF-A, VEGF-A145, VEGF-A165, VEGF-C, VEGF-D, PIGF-2), fibroblast growth factor (FGF), galectin, hepatocyte growth factor (HGF), platelet derived growth factor (PDGF), transforming growth factor (TGF)-beta, androgens, estrogens, and somatostatin analogs. Examples of hormonal antagonists include hormone synthesis inhibitors such as aromatase inhibitors and gonadotropin-releasing hormone (GnRH)s agonists (e.g., leuprolide, goserelin, triptorelin, histrelin) including analogs thereof. Also included are hormone receptor antagonist such as selective estrogen receptor modulators (SERMs; e.g., tamoxifen, raloxifene, toremifene) and anti-androgens (e.g., flutamide, bicalutamide, nilutamide).

[0197] Also included are hormonal pathway inhibitors such as antibodies directed against hormonal receptors. Examples include inhibitors of the IGF receptor (e.g., IGF-IR1) such as cixutumumab, dalotuzumab, figitumumab, ganitumab, istiratumab, and robatumumab; inhibitors of the vascular endothelial growth factor receptors 1, 2 or 3 (VEGFR1, VEGFR2 or VEGFR3) such as alacizumab pegol, bevacizumab, icrucumab, ramucirumab; inhibitors of the TGF-beta receptors R1, R2, and R3 such as fresolimumab and metelimumab; inhibitors of c-Met such as naxitamab; inhibitors of the EGF receptor such as cetuximab, depatuxizumab mafodotin, futuximab, imgatuzumab, laprituximab emtansine, matuzumab, modotuximab, necitumumab, nimotuzumab, panitumumab, tomuzotuximab, and zalutumumab; inhibitors of the FGF receptor such as aprutumab, ixadotin, and bemarituzumab; and inhibitors of the PDGF receptor such as olaratumab and tovetumab.

[0198] The skilled artisan will appreciate that the various hormonal therapeutic agents described herein can be combined with any one or more of the various activatable proproteins described herein, and used according to any one or more of the methods or compositions described herein.

[0199] Certain combination therapies employ at least one kinase inhibitor, including tyrosine kinase inhibitors. Examples of kinase inhibitors include, without limitation, adavosertib, afanitib, aflibercept, axitinib, bevacizumab, bosutinib, cabozantinib, cetuximab, cobimetinib, crizotinib, dasatinib, entrectinib, erdafitinib, erlotinib, fostamitinib, gefitinib, ibrutinib, imatinib, lapatinib, lenvatinib, mubritinib, nilotinib, panitumumab, pazopanib, pegaptanib, ponatinib, ranibizumab, regorafenib, ruxolitinib, sorafenib, sunitinib, SU6656, tofacitinib, trastuzumab, vandetanib, and vemuafenib.

[0200] The skilled artisan will appreciate that the various kinase inhibitors described herein can be combined with any one or more of the various activatable proproteins described herein, and used according to any one or more of the methods or compositions described herein.

[0201] Certain methods include administering the proprotein homodimers described herein in combination with chimeric antigen receptor (CAR)-modified immune cells or adoptive cell therapies (ACT), for example, to enhance the treatment of cancer. For instance, certain embodiments comprise treating cancer by administering an activatable proprotein homodimer in combination with a CAR-modified immune cell to the subject, for example, a CAR-modified T-cell, natural killer (NK) cell, or induced pluripotent stem cell-derived lymphocyte, wherein the CAR-modified immune cell is modified to express an exogenous IL-2Rα protein variant that binds to the IL-2 protein variant as described herein. Some embodiments include treating cancer by administering an activatable proprotein homodimer in combination with an adoptive cell therapy (ACT), for example, adoptive T-cell therapy, wherein the adoptively-transferred cells are modified to express an exogenous IL-2Rα protein variant that binds to the IL-2 protein variant as described herein. In particular embodiments, the IL-2 protein variant has a reduced binding affinity to wild-type IL-2Rα present on endogenous cells in the subject of about or at least about 2-fold, 5-fold, 10-fold, 50-fold, 100-fold, 1000-fold or more, relative to the binding affinity of the wild-type IL-2 sequence. CAR-modified therapies and adoptive T-cell therapies are well-known in the art. In specific embodiments, the CAR-modified T-cell or NK cell is targeted against CD-19 (see, e.g., Maude et al., Blood. 125:4017-4023, 2015).

[0202] In some embodiments, the methods and pharmaceutical compositions described herein increase median survival time of a subject by 4 weeks, 5 weeks, 6 weeks, 7 weeks, 8 weeks, 9 weeks, 10 weeks, 15 weeks, 20 weeks, 25 weeks, 30 weeks, 40 weeks, or longer. In certain embodiments, the methods and pharmaceutical compositions described herein increase median survival time of a subject by 1 year, 2 years, 3 years, or longer. In some embodiments, the methods and pharmaceutical compositions increase progression-free survival by 2 weeks, 3 weeks, 4 weeks, 5 weeks, 6 weeks, 7 weeks, 8 weeks, 9 weeks, 10 weeks or longer. In certain embodiments, the methods and pharmaceutical compositions described herein increase progression-free survival by 1 year, 2 years, 3 years, or longer.

[0203] In certain embodiments, the methods and therapeutic compositions described herein are sufficient to result in tumor regression, as indicated by a statistically significant decrease in the amount of viable tumor, for example, at least a 10%, 20%, 30%, 40%, 50% or greater decrease in tumor mass, or by altered (e.g., decreased with statistical significance) scan dimensions. In certain embodiments, the methods and therapeutic compositions described herein are sufficient to result in stable disease.

[0204] In some embodiments, the disease is a viral disease or viral infection. In certain embodiments, the viral infection is selected from one or more of human immunodeficiency virus (HIV), Hepatitis A, Hepatitis B, Hepatitis C, Hepatitis E, Caliciviruses associated diarrhoea, Rotavirus diarrhoea, Haemophilus influenzae B pneumonia and invasive disease, influenza, measles, mumps, rubella, Parainfluenza associated pneumonia, Respiratory syncytial virus (RSV) pneumonia, Severe Acute Respiratory Syndrome (SARS), Human papillomavirus, Herpes simplex type 2 genital ulcers, Dengue Fever, Japanese encephalitis, Tick-borne encephalitis, West-Nile virus associated disease, Yellow Fever, Epstein-Barr virus, Lassa fever, Crimean-Congo haemorrhagic fever, Ebola haemorrhagic fever, Marburg haemorrhagic fever, Rabies, Rift Valley fever, Smallpox, upper and lower respiratory infections, and poliomyelitis. In specific embodiments, the subject is HIV-positive. In some embodiments, the methods and pharmaceutical compositions described herein increase an anti-viral immune response by about or at least about 5, 10, 15, 20, 25, 30, 35, 40, 45, 50, 60, 70, 80, 90, 100, 200, 300, 400, 500, 600, 700, 800, 900, 1000, 2000% or more, relative to a control.

[0205] In some embodiments, the immune disorder is selected from one or more of type 1 diabetes, vasculitis, and an immunodeficiency. In some embodiments, the methods and pharmaceutical compositions described herein improve immune function in the subject, for example, by about or at least about 5, 10, 15, 20, 25, 30, 35, 40, 45, 50, 60, 70, 80, 90, 100, 200, 300, 400, 500, 600, 700, 800, 900, 1000, 2000% or more, relative to a control.

[0206] In certain embodiments, the methods and therapeutic compositions described herein are sufficient to result in clinically relevant reduction in symptoms of a particular disease indication known to the skilled clinician.

[0207] For in vivo use, as noted above, for the treatment of human or non-human mammalian disease or testing, the agents described herein are generally incorporated into one or more therapeutic or pharmaceutical compositions prior to administration, including veterinary therapeutic compositions.

[0208] Thus, certain embodiments relate to pharmaceutical or therapeutic compositions that comprise at least one activatable proprotein, as described herein. In some instances, a pharmaceutical or therapeutic composition comprises one or more of the activatable proproteins described herein in combination with a pharmaceutically- or physiologically-acceptable carrier or excipient. Certain pharmaceutical or therapeutic compositions further comprise at least one additional agent, for example, a chemotherapeutic agent, a hormonal therapeutic agent, and/or a kinase inhibitor as described herein.

[0209] Some therapeutic compositions comprise (and certain methods utilize) only one activatable proprotein. Certain therapeutic compositions comprise (and certain methods utilize) a mixture of at least two, three, four, or five different activatable proproteins.

[0210] In particular embodiments, the pharmaceutical or therapeutic compositions comprising at least one activatable proprotein is substantially pure on a protein basis or a weight-weight basis, for example, the composition has a purity of at least about 80%, 85%, 90%, 95%, 98%, or 99% on a protein basis or a weight-weight basis.

[0211] In certain embodiments, the first and second polypeptides, prior to cleavage, are substantially in homodimeric form in a composition or other physiological solution, or under physiological conditions, for example, in vivo conditions.

[0212] In some embodiments, the activatable proproteins described herein do not form aggregates, have a desired solubility, and/or have an immunogenicity profile that is suitable for use in humans, as known in the art. Thus, in some embodiments, the therapeutic composition comprising an activatable proprotein is substantially aggregate-free. For example, certain compositions comprise less than about 10% (on a protein basis) high molecular weight aggregated proteins, or less than about 5% high molecular weight aggregated proteins, or less than about 4% high molecular weight aggregated proteins, or less than about 3% high molecular weight aggregated proteins, or less than about 2% high molecular weight aggregated proteins, or less than about 1% high molecular weight aggregated proteins. Some compositions comprise an activatable proprotein that is at least about 50%, about 60%, about 70%, about 80%, about 90% or about 95% monodisperse with respect to its apparent molecular mass.

[0213] In some embodiments, the activatable proprotein are concentrated to about or at least about 0.1 mg/ml, 0.2 mg/ml, 0.3 mg/ml, 0.4 mg/ml, 0.5 mg/ml, 0.6, 0.7, 0.8, 0.9, 1 mg/ml, 2 mg/ml, 3 mg/ml, 4 mg/ml, 5 mg/ml, 6 mg/ml, 7 mg/ml, 8 mg/ml, 9 mg/ml, 10 mg/ml, 11, 12, 13, 14 or 15 mg/ml and are formulated for biotherapeutic uses.

[0214] To prepare a therapeutic or pharmaceutical composition, an effective or desired amount of one or more agents is mixed with any pharmaceutical carrier(s) or excipient known to those skilled in the art to be suitable for the particular agent and/or mode of administration. A pharmaceutical carrier may be liquid, semi-liquid or solid. Solutions or suspensions used for parenteral, intradermal, subcutaneous or topical application may include, for example, a sterile diluent (such as water), saline solution (e.g., phosphate buffered saline; PBS), fixed oil, polyethylene glycol, glycerin, propylene glycol or other synthetic solvent; antimicrobial agents (such as benzyl alcohol and methyl parabens); antioxidants (such as ascorbic acid and sodium bisulfite) and chelating agents (such as ethylenediaminetetraacetic acid (EDTA)); buffers (such as acetates, citrates and phosphates). If administered intravenously (e.g., by IV infusion), suitable carriers include physiological saline or phosphate buffered saline (PBS), and solutions containing thickening and solubilizing agents, such as glucose, polyethylene glycol, polypropylene glycol and mixtures thereof.

[0215] Administration of agents described herein, in pure form or in an appropriate therapeutic or pharmaceutical composition, can be carried out via any of the accepted modes of administration of agents for serving similar utilities. The therapeutic or pharmaceutical compositions can be prepared by combining an agent-containing composition with an appropriate physiologically acceptable carrier, diluent or excipient, and may be formulated into preparations in solid, semi-solid, liquid or gaseous forms, such as tablets, capsules, powders, granules, ointments, solutions, suppositories, injections, inhalants, gels, microspheres, and aerosols. In addition, other pharmaceutically active ingredients (including other small molecules as described elsewhere herein) and/or suitable excipients such as salts, buffers and stabilizers may, but need not, be present within the composition.

[0216] Administration may be achieved by a variety of different routes, including oral, parenteral, nasal, intravenous, intradermal, intramuscular, subcutaneous or topical. Preferred modes of administration depend upon the nature of the condition to be treated or prevented. Particular embodiments include administration by IV infusion.

[0217] Carriers can include, for example, pharmaceutically- or physiologically-acceptable carriers, excipients, or stabilizers that are non-toxic to the cell or mammal being exposed thereto at the dosages and concentrations employed. Often the physiologically-acceptable carrier is an aqueous pH buffered solution. Examples of physiologically acceptable carriers include buffers such as phosphate, citrate, and other organic acids; antioxidants including ascorbic acid; low molecular weight (less than about 10 residues) polypeptide; proteins, such as serum albumin, gelatin, or immunoglobulins; hydrophilic polymers such as polyvinylpyrrolidone; amino acids such as glycine, glutamine, asparagine, arginine or lysine; monosaccharides, disaccharides, and other carbohydrates including glucose, mannose, or dextrins; chelating agents such as EDTA; sugar alcohols such as mannitol or sorbitol; salt-forming counterions such as sodium; and/or nonionic surfactants such as polysorbate 20 (TWEEN™) polyethylene glycol (PEG), and poloxamers (PLURONICS™), and the like.

[0218] In some embodiments, one or more agents can be entrapped in microcapsules prepared, for example, by coacervation techniques or by interfacial polymerization (for example, hydroxymethylcellulose or gelatin-microcapsules and poly-(methylmethacylate)microcapsules, respectively), in colloidal drug delivery systems (for example, liposomes, albumin microspheres, microemulsions, nano-particles and nanocapsules), or in macroemulsions. Such techniques are disclosed in Remington's Pharmaceutical Sciences, 16th edition, Oslo, A., Ed., (1980). The particle(s) or liposomes may further comprise other therapeutic or diagnostic agents.

[0219] The precise dosage and duration of treatment is a function of the disease being treated and may be determined empirically using known testing protocols or by testing the compositions in model systems known in the art and extrapolating therefrom. Controlled clinical trials may also be performed. Dosages may also vary with the severity of the condition to be alleviated. A pharmaceutical composition is generally formulated and administered to exert a therapeutically useful effect while minimizing undesirable side effects. The composition may be administered one time, or may be divided into a number of smaller doses to be administered at intervals of time. For any particular subject, specific dosage regimens may be adjusted over time according to the individual need.

[0220] Typical routes of administering these and related therapeutic or pharmaceutical compositions thus include, without limitation, oral, topical, transdermal, inhalation, parenteral, sublingual, buccal, rectal, vaginal, and intranasal. The term parenteral as used herein includes subcutaneous injections, intravenous, intramuscular, intrasternal injection or infusion techniques. Therapeutic or pharmaceutical compositions according to certain embodiments of the present disclosure are formulated so as to allow the active ingredients contained therein to be bioavailable upon administration of the composition to a subject or patient. Compositions that will be administered to a subject or patient may take the form of one or more dosage units, where for example, a tablet may be a single dosage unit, and a container of a herein described agent in aerosol form may hold a plurality of dosage units. Actual methods of preparing such dosage forms are known, or will be apparent, to those skilled in this art; for example, see Remington: The Science and Practice of Pharmacy, 20th Edition (Philadelphia College of Pharmacy and Science, 2000). The composition to be administered will typically contain a therapeutically effective amount of an agent described herein, for treatment of a disease or condition of interest.

[0221] A therapeutic or pharmaceutical composition may be in the form of a solid or liquid. In one embodiment, the carrier(s) are particulate, so that the compositions are, for example, in tablet or powder form. The carrier(s) may be liquid, with the compositions being, for example, an oral oil, injectable liquid or an aerosol, which is useful in, for example, inhalatory administration. When intended for oral administration, the pharmaceutical composition is preferably in either solid or liquid form, where semi-solid, semi-liquid, suspension and gel forms are included within the forms considered herein as either solid or liquid. Certain embodiments include sterile, injectable solutions.

[0222] As a solid composition for oral administration, the pharmaceutical composition may be formulated into a powder, granule, compressed tablet, pill, capsule, chewing gum, wafer or the like. Such a solid composition will typically contain one or more inert diluents or edible carriers. In addition, one or more of the following may be present: binders such as carboxymethylcellulose, ethyl cellulose, microcrystalline cellulose, gum tragacanth or gelatin; excipients such as starch, lactose or dextrins, disintegrating agents such as alginic acid, sodium alginate, Primogel, corn starch and the like; lubricants such as magnesium stearate or Sterotex; glidants such as colloidal silicon dioxide; sweetening agents such as sucrose or saccharin; a flavoring agent such as peppermint, methyl salicylate or orange flavoring; and a coloring agent. When the pharmaceutical composition is in the form of a capsule, for example, a gelatin capsule, it may contain, in addition to materials of the above type, a liquid carrier such as polyethylene glycol or oil.

[0223] The therapeutic or pharmaceutical composition may be in the form of a liquid, for example, an elixir, syrup, solution, emulsion or suspension. The liquid may be for oral administration or for delivery by injection, as two examples. When intended for oral administration, preferred composition contain, in addition to the present compounds, one or more of a sweetening agent, preservatives, dye/colorant and flavor enhancer. In a composition intended to be administered by injection, one or more of a surfactant, preservative, wetting agent, dispersing agent, suspending agent, buffer, stabilizer and isotonic agent may be included.

[0224] The liquid therapeutic or pharmaceutical compositions, whether they be solutions, suspensions or other like form, may include one or more of the following adjuvants: sterile diluents such as water for injection, saline solution, preferably physiological saline, Ringer's solution, isotonic sodium chloride, fixed oils such as synthetic mono or diglycerides which may serve as the solvent or suspending medium, polyethylene glycols, glycerin, propylene glycol or other solvents; antibacterial agents such as benzyl alcohol or methyl paraben; antioxidants such as ascorbic acid or sodium bisulfite; chelating agents such as ethylenediaminetetraacetic acid; buffers such as acetates, citrates or phosphates and agents for the adjustment of tonicity such as sodium chloride or dextrose. The parenteral preparation can be enclosed in ampoules, disposable syringes or multiple dose vials made of glass or plastic. Physiological saline is a preferred adjuvant. An injectable pharmaceutical composition is preferably sterile.

[0225] A liquid therapeutic or pharmaceutical composition intended for either parenteral or oral administration should contain an amount of an agent such that a suitable dosage will be obtained. Typically, this amount is at least 0.01% of the agent of interest in the composition. When intended for oral administration, this amount may be varied to be between 0.1 and about 70% of the weight of the composition. Certain oral therapeutic or pharmaceutical compositions contain between about 4% and about 75% of the agent of interest. In certain embodiments, therapeutic or pharmaceutical compositions and preparations are prepared so that a parenteral dosage unit contains between 0.01 to 10% by weight of the agent of interest prior to dilution.

[0226] The therapeutic or pharmaceutical compositions may be intended for topical administration, in which case the carrier may suitably comprise a solution, emulsion, ointment or gel base. The base, for example, may comprise one or more of the following: petrolatum, lanolin, polyethylene glycols, bee wax, mineral oil, diluents such as water and alcohol, and emulsifiers and stabilizers. Thickening agents may be present in a therapeutic or pharmaceutical composition for topical administration. If intended for transdermal administration, the composition may include a transdermal patch or iontophoresis device.

[0227] The therapeutic or pharmaceutical compositions may be intended for rectal administration, in the form, for example, of a suppository, which will melt in the rectum and release the drug. The composition for rectal administration may contain an oleaginous base as a suitable nonirritating excipient. Such bases include, without limitation, lanolin, cocoa butter, and polyethylene glycol.

[0228] The therapeutic or pharmaceutical composition may include various materials, which modify the physical form of a solid or liquid dosage unit. For example, the composition may include materials that form a coating shell around the active ingredients. The materials that form the coating shell are typically inert, and may be selected from, for example, sugar, shellac, and other enteric coating agents. Alternatively, the active ingredients may be encased in a gelatin capsule. The therapeutic or pharmaceutical compositions in solid or liquid form may include a component that binds to agent and thereby assists in the delivery of the compound. Suitable components that may act in this capacity include monoclonal or polyclonal antibodies, one or more proteins or a liposome.

[0229] The therapeutic or pharmaceutical composition may consist essentially of dosage units that can be administered as an aerosol. The term aerosol is used to denote a variety of systems ranging from those of colloidal nature to systems consisting of pressurized packages. Delivery may be by a liquefied or compressed gas or by a suitable pump system that dispenses the active ingredients. Aerosols may be delivered in single phase, bi-phasic, or tri-phasic systems in order to deliver the active ingredient(s). Delivery of the aerosol includes the necessary container, activators, valves, subcontainers, and the like, which together may form a kit. One of ordinary skill in the art, without undue experimentation may determine preferred aerosols.

[0230] The compositions described herein may be prepared with carriers that protect the agents against rapid elimination from the body, such as time release formulations or coatings. Such carriers include controlled release formulations, such as, but not limited to, implants and microencapsulated delivery systems, and biodegradable, biocompatible polymers, such as ethylene vinyl acetate, polyanhydrides, polyglycolic acid, polyorthoesters, polylactic acid and others known to those of ordinary skill in the art.

[0231] The therapeutic or pharmaceutical compositions may be prepared by methodology well known in the pharmaceutical art. For example, a therapeutic or pharmaceutical composition intended to be administered by injection may comprise one or more of salts, buffers and/or stabilizers, with sterile, distilled water so as to form a solution. A surfactant may be added to facilitate the formation of a homogeneous solution or suspension. Surfactants are compounds that non-covalently interact with the agent so as to facilitate dissolution or homogeneous suspension of the agent in the aqueous delivery system.

[0232] The therapeutic or pharmaceutical compositions may be administered in a therapeutically effective amount, which will vary depending upon a variety of factors including the activity of the specific compound employed; the metabolic stability and length of action of the compound; the age, body weight, general health, sex, and diet of the subject; the mode and time of administration; the rate of excretion; the drug combination; the severity of the particular disorder or condition; and the subject undergoing therapy. In some instances, a therapeutically effective daily dose is (for a 70 kg mammal) from about 0.001 mg/kg (i.e., ˜0.07 mg) to about 100 mg/kg (i.e., ˜7.0 g); preferably a therapeutically effective dose is (for a 70 kg mammal) from about 0.01 mg/kg (i.e., ˜0.7 mg) to about 50 mg/kg (i.e., ˜3.5 g); more preferably a therapeutically effective dose is (for a 70 kg mammal) from about 1 mg/kg (i.e., ˜70 mg) to about 25 mg/kg (i.e., ˜1.75 g). In some embodiments, the therapeutically effective dose is administered on a weekly, bi-weekly, or monthly basis. In specific embodiments, the therapeutically effective dose is administered on a weekly, bi-weekly, or monthly basis, for example, at a dose of about 1-10 or 1-5 mg/kg, or about 1, 2, 3, 4, 5, 6, 7, 8, 9, or 10 mg/kg.

[0233] The combination therapies described herein may include administration of a single pharmaceutical dosage formulation, which contains an activatable proprotein and an additional therapeutic agent (e.g., chemotherapeutic agent, hormonal therapeutic agent, kinase inhibitor), as well as administration of compositions comprising an activatable proprotein and an additional therapeutic agent in its own separate pharmaceutical dosage formulation. For example, an activatable proprotein and additional therapeutic agent can be administered to the subject together in a single oral dosage composition such as a tablet or capsule, or each agent administered in separate oral dosage formulations. Similarly, an activatable proprotein and additional therapeutic agent can be administered to the subject together in a single parenteral dosage composition such as in a saline solution or other physiologically acceptable solution, or each agent administered in separate parenteral dosage formulations. As another example, for cell-based therapies, an activatable proprotein can be mixed with the cells prior to administration, administered as part of a separate composition, or both. Where separate dosage formulations are used, the compositions can be administered at essentially the same time, i.e., concurrently, or at separately staggered times, i.e., sequentially and in any order; combination therapy is understood to include all these regimens.

[0234] Also included are patient care kits, comprising (a) at least one activatable proprotein, as described herein; and optionally (b) at least one additional therapeutic agent (e.g., chemotherapeutic agent, hormonal therapeutic agent, kinase inhibitor). In certain kits, (a) and (b) are in separate therapeutic compositions. In some kits, (a) and (b) are in the same therapeutic composition.

[0235] The kits herein may also include a one or more additional therapeutic agents or other components suitable or desired for the indication being treated, or for the desired diagnostic application. The kits herein can also include one or more syringes or other components necessary or desired to facilitate an intended mode of delivery (e.g., stents, implantable depots, etc.).

[0236] In some embodiments, a patient care kit contains separate containers, dividers, or compartments for the composition(s) and informational material(s). For example, the composition(s) can be contained in a bottle, vial, or syringe, and the informational material(s) can be contained in association with the container. In some embodiments, the separate elements of the kit are contained within a single, undivided container. For example, the composition is contained in a bottle, vial or syringe that has attached thereto the informational material in the form of a label. In some embodiments, the kit includes a plurality (e.g., a pack) of individual containers, each containing one or more unit dosage forms (e.g., a dosage form described herein) of an activatable proprotein and optionally at least one additional therapeutic agent. For example, the kit includes a plurality of syringes, ampules, foil packets, or blister packs, each containing a single unit dose of an activatable proprotein and optionally at least one additional therapeutic agent. The containers of the kits can be air tight, waterproof (e.g., impermeable to changes in moisture or evaporation), and/or light-tight.

[0237] The patient care kit optionally includes a device suitable for administration of the composition, e.g., a syringe, inhalant, dropper (e.g., eye dropper), swab (e.g., a cotton swab or wooden swab), or any such delivery device. In some embodiments, the device is an implantable device that dispenses metered doses of the agent(s). Also included are methods of providing a kit, e.g., by combining the components described herein.

[0238] Expression and Purification Systems

[0239] Certain embodiments include methods and related compositions for expressing and purifying an activatable proprotein described herein. Such recombinant activatable proproteins can be conveniently prepared using standard protocols as described for example in Sambrook, et al., (1989, supra), in particular Sections 16 and 17; Ausubel et al., (1994, supra), in particular Chapters 10 and 16; and Coligan et al., Current Protocols in Protein Science (John Wiley & Sons, Inc. 1995-1997), in particular Chapters 1, 5 and 6. As one general example, activatable proproteins may be prepared by a procedure including one or more of the steps of: (a) preparing one or more vectors or constructs comprising one or more polynucleotide sequences that encode an individual polypeptide chain of the homodimer, which are operably linked to one or more regulatory elements; (b) introducing the one or more vectors or constructs into one or more host cells; (c) culturing the one or more host cell to express the polypeptides, which bind together to form an activatable proprotein homodimer; and (d) isolating the activatable proprotein homodimer from the host cell. Alternatively, the polypeptide chain can be first isolated and produced in a host cell, and then incubated under suitable conditions to form an activatable proprotein homodimer.

[0240] To express a desired polypeptide, a nucleotide sequence encoding a first and/or second polypeptide chain of an activatable proprotein may be inserted into appropriate expression vector(s), i.e., vector(s) which contain the necessary elements for the transcription and translation of the inserted coding sequence. Methods which are well known to those skilled in the art may be used to construct expression vectors containing sequences encoding a polypeptide of interest and appropriate transcriptional and translational control elements. These methods include in vitro recombinant DNA techniques, synthetic techniques, and in vivo genetic recombination. Such techniques are described in Sambrook et al., Molecular Cloning, A Laboratory Manual (1989), and Ausubel et al., Current Protocols in Molecular Biology (1989).

[0241] A variety of expression vector/host systems are known and may be utilized to contain and express polynucleotide sequences. These include, but are not limited to, microorganisms such as bacteria transformed with recombinant bacteriophage, plasmid, or cosmid DNA expression vectors; yeast transformed with yeast expression vectors; insect cell systems infected with virus expression vectors (e.g., baculovirus); plant cell systems transformed with virus expression vectors (e.g., cauliflower mosaic virus, CaMV; tobacco mosaic virus, TMV) or with bacterial expression vectors (e.g., Ti or pBR322 plasmids); or animal cell systems, including mammalian cell and more specifically human cell systems.

[0242] The “control elements” or “regulatory sequences” present in an expression vector are those non-translated regions of the vector—enhancers, promoters, 5′ and 3′ untranslated regions—which interact with host cellular proteins to carry out transcription and translation. Such elements may vary in their strength and specificity. Depending on the vector system and host utilized, any number of suitable transcription and translation elements, including constitutive and inducible promoters, may be used. For example, when cloning in bacterial systems, inducible promoters such as the hybrid lacZ promoter of the PBLUESCRIPT phagemid (Stratagene, La Jolla, Calif.) or PSPORT1 plasmid (Gibco BRL, Gaithersburg, Md.) and the like may be used. In mammalian cell systems, promoters from mammalian genes or from mammalian viruses are generally preferred. If it is necessary to generate a cell line that contains multiple copies of the sequence encoding a polypeptide, vectors based on SV40 or EBV may be advantageously used with an appropriate selectable marker.

[0243] In bacterial systems, a number of expression vectors may be selected depending upon the use intended for the expressed polypeptide. For example, when large quantities are needed, vectors which direct high level expression of fusion proteins that are readily purified may be used. Such vectors include, but are not limited to, the multifunctional E. coli cloning and expression vectors such as BLUESCRIPT (Stratagene), in which the sequence encoding the polypeptide of interest may be ligated into the vector in frame with sequences for the amino-terminal Met and the subsequent 7 residues of β-galactosidase so that a hybrid protein is produced; pIN vectors (Van Heeke & Schuster, J. Biol. Chem. 264:5503 5509 (1989)); and the like. pGEX Vectors (Promega, Madison, Wis.) may also be used to express foreign polypeptides as fusion proteins with glutathione S-transferase (GST). In general, such fusion proteins are soluble and can easily be purified from lysed cells by adsorption to glutathione-agarose beads followed by elution in the presence of free glutathione. Proteins made in such systems may be designed to include heparin, thrombin, or factor XA protease cleavage sites so that the cloned polypeptide of interest can be released from the GST moiety at will.

[0244] Certain embodiments employ E. coli-based expression systems (see, e.g., Structural Genomics Consortium et al., Nature Methods. 5:135-146, 2008). These and related embodiments may rely partially or totally on ligation-independent cloning (LIC) to produce a suitable expression vector. In specific embodiments, protein expression may be controlled by a T7 RNA polymerase (e.g., pET vector series). These and related embodiments may utilize the expression host strain BL21(DE3), a λDE3 lysogen of BL21 that supports T7-mediated expression and is deficient in lon and ompT proteases for improved target protein stability. Also included are expression host strains carrying plasmids encoding tRNAs rarely used in E. coli, such as ROSETTA™ (DE3) and Rosetta 2 (DE3) strains. Cell lysis and sample handling may also be improved using reagents sold under the trademarks BENZONASE® nuclease and BUGBUSTER® Protein Extraction Reagent. For cell culture, auto-inducing media can improve the efficiency of many expression systems, including high-throughput expression systems. Media of this type (e.g., OVERNIGHT EXPRESS™ Autoinduction System) gradually elicit protein expression through metabolic shift without the addition of artificial inducing agents such as IPTG. Particular embodiments employ hexahistidine tags (such as those sold under the trademark HIS⋅TAG® fusions), followed by immobilized metal affinity chromatography (IMAC) purification, or related techniques. In certain aspects, however, clinical grade proteins can be isolated from E. coli inclusion bodies, without or without the use of affinity tags (see, e g, Shimp et al., Protein Expr Purif. 50:58-67, 2006). As a further example, certain embodiments may employ a cold-shock induced E. coli high-yield production system, because over-expression of proteins in Escherichia coli at low temperature improves their solubility and stability (see, e.g., Qing et al., Nature Biotechnology. 22:877-882, 2004).

[0245] Also included are high-density bacterial fermentation systems. For example, high cell density cultivation of Ralstonia eutropha allows protein production at cell densities of over 150 g/L, and the expression of recombinant proteins at titers exceeding 10 g/L.

[0246] In the yeast Saccharomyces cerevisiae, a number of vectors containing constitutive or inducible promoters such as alpha factor, alcohol oxidase, and PGH may be used. For reviews, see Ausubel et al. (supra) and Grant et al., Methods Enzymol. 153:516-544 (1987). Also included are Pichia pandoris expression systems (see, e.g., Li et al., Nature Biotechnology. 24, 210-215, 2006; and Hamilton et al., Science, 301:1244, 2003). Certain embodiments include yeast systems that are engineered to selectively glycosylate proteins, including yeast that have humanized N-glycosylation pathways, among others (see, e.g., Hamilton et al., Science. 313:1441-1443, 2006; Wildt et al., Nature Reviews Microbiol. 3:119-28, 2005; and Gerngross et al., Nature-Biotechnology. 22:1409-1414, 2004; U.S. Pat. Nos. 7,629,163; 7,326,681; and 7,029,872). Merely by way of example, recombinant yeast cultures can be grown in Fernbach Flasks or 15 L, 50 L, 100 L, and 200 L fermentors, among others.

[0247] In cases where plant expression vectors are used, the expression of sequences encoding polypeptides may be driven by any of a number of promoters. For example, viral promoters such as the 35S and 19S promoters of CaMV may be used alone or in combination with the omega leader sequence from TMV (Takamatsu, EMBO J. 6:307-311 (1987)). Alternatively, plant promoters such as the small subunit of RUBISCO or heat shock promoters may be used (Coruzzi et al., EMBO J. 3:1671-1680 (1984); Broglie et al., Science 224:838-843 (1984); and Winter et al., Results Probl. Cell Differ. 17:85-105 (1991)). These constructs can be introduced into plant cells by direct DNA transformation or pathogen-mediated transfection. Such techniques are described in a number of generally available reviews (see, e.g., Hobbs in McGraw Hill, Yearbook of Science and Technology, pp. 191-196 (1992)).

[0248] An insect system may also be used to express a polypeptide of interest. For example, in one such system, Autographa californica nuclear polyhedrosis virus (AcNPV) is used as a vector to express foreign genes in Spodoptera frugiperda cells or in Trichoplusia cells. The sequences encoding the polypeptide may be cloned into a non-essential region of the virus, such as the polyhedrin gene, and placed under control of the polyhedrin promoter. Successful insertion of the polypeptide-encoding sequence will render the polyhedrin gene inactive and produce recombinant virus lacking coat protein. The recombinant viruses may then be used to infect, for example, S. frugiperda cells or Trichoplusia cells in which the polypeptide of interest may be expressed (Engelhard et al., Proc. Natl. Acad. Sci. U.S.A. 91:3224-3227 (1994)). Also included are baculovirus expression systems, including those that utilize SF9, SF21, and T. ni cells (see, e.g., Murphy and Piwnica-Worms, Curr Protoc Protein Sci. Chapter 5:Unit 5.4, 2001). Insect systems can provide post-translation modifications that are similar to mammalian systems.

[0249] In mammalian host cells, a number of viral-based expression systems are generally available. For example, in cases where an adenovirus is used as an expression vector, sequences encoding a polypeptide of interest may be ligated into an adenovirus transcription/translation complex consisting of the late promoter and tripartite leader sequence. Insertion in a non-essential E1 or E3 region of the viral genome may be used to obtain a viable virus which is capable of expressing the polypeptide in infected host cells (Logan & Shenk, Proc. Natl. Acad. Sci. U.S.A. 81:3655-3659 (1984)). In addition, transcription enhancers, such as the Rous sarcoma virus (RSV) enhancer, may be used to increase expression in mammalian host cells.

[0250] Examples of useful mammalian host cell lines include monkey kidney CV1 line transformed by SV40 (COS-7, ATCC CRL 1651); human embryonic kidney line (293 or 293 cells sub-cloned for growth in suspension culture, Graham et al., J. Gen Virol. 36:59 (1977)); baby hamster kidney cells (BHK, ATCC CCL 10); mouse sertoli cells (TM4, Mather, Biol. Reprod. 23:243-251 (1980)); monkey kidney cells (CV1 ATCC CCL 70); African green monkey kidney cells (VERO-76, ATCC CRL-1587); human cervical carcinoma cells (HELA, ATCC CCL 2); canine kidney cells (MDCK, ATCC CCL 34); buffalo rat liver cells (BRL 3A, ATCC CRL 1442); human lung cells (W138, ATCC CCL 75); human liver cells (Hep G2, HB 8065); mouse mammary tumor (MMT 060562, ATCC CCL51); TR1 cells (Mather et al., Annals N.Y. Acad. Sci. 383:44-68 (1982)); MRC 5 cells; FS4 cells; and a human hepatoma line (Hep G2). Other useful mammalian host cell lines include Chinese hamster ovary (CHO) cells, including DHFR-CHO cells (Urlaub et al., PNAS USA 77:4216 (1980)); and myeloma cell lines such as NSO and Sp2/0. For a review of certain mammalian host cell lines suitable for protein production, see, e.g., Yazaki and Wu, Methods in Molecular Biology, Vol. 248 (B. K. C Lo, ed., Humana Press, Totowa, N.J., 2003), pp. 255-268. Certain preferred mammalian cell expression systems include CHO and HEK293-cell based expression systems Mammalian expression systems can utilize attached cell lines, for example, in T-flasks, roller bottles, or cell factories, or suspension cultures, for example, in 1L and 5L spinners, 5L, 14L, 40L, 100L and 200L stir tank bioreactors, or 20/50L and 100/200L WAVE bioreactors, among others known in the art.

[0251] Also included is the cell-free expression of proteins. These and related embodiments typically utilize purified RNA polymerase, ribosomes, tRNA and ribonucleotides; these reagents may be produced by extraction from cells or from a cell-based expression system.

[0252] Specific initiation signals may also be used to achieve more efficient translation of sequences encoding a polypeptide of interest. Such signals include the ATG initiation codon and adjacent sequences. In cases where sequences encoding the polypeptide, its initiation codon, and upstream sequences are inserted into the appropriate expression vector, no additional transcriptional or translational control signals may be needed. However, in cases where only coding sequence, or a portion thereof, is inserted, exogenous translational control signals including the ATG initiation codon should be provided. Furthermore, the initiation codon should be in the correct reading frame to ensure translation of the entire insert. Exogenous translational elements and initiation codons may be of various origins, both natural and synthetic. The efficiency of expression may be enhanced by the inclusion of enhancers which are appropriate for the particular cell system which is used, such as those described in the literature (Scharf. et al., Results Probl. Cell Differ. 20:125-162 (1994)).

[0253] In addition, a host cell strain may be chosen for its ability to modulate the expression of the inserted sequences or to process the expressed protein in the desired fashion. Such modifications of the polypeptide include, but are not limited to, post-translational modifications such as acetylation, carboxylation, glycosylation, phosphorylation, lipidation, and acylation. Post-translational processing which cleaves a “prepro” form of the protein may also be used to facilitate correct insertion, folding and/or function. Different host cells such as yeast, CHO, HeLa, MDCK, HEK293, and W138, in addition to bacterial cells, which have or even lack specific cellular machinery and characteristic mechanisms for such post-translational activities, may be chosen to ensure the correct modification and processing of the foreign protein.

[0254] For long-term, high-yield production of recombinant proteins, stable expression is generally preferred. For example, cell lines which stably express a polynucleotide of interest may be transformed using expression vectors which may contain viral origins of replication and/or endogenous expression elements and a selectable marker gene on the same or on a separate vector. Following the introduction of the vector, cells may be allowed to grow for about 1-2 days in an enriched media before they are switched to selective media. The purpose of the selectable marker is to confer resistance to selection, and its presence allows growth and recovery of cells which successfully express the introduced sequences. Resistant clones of stably transformed cells may be proliferated using tissue culture techniques appropriate to the cell type. Transient production, such as by transient transfection or infection, can also be employed. Exemplary mammalian expression systems that are suitable for transient production include HEK293 and CHO-based systems.

[0255] Any number of selection systems may be used to recover transformed or transduced cell lines. These include, but are not limited to, the herpes simplex virus thymidine kinase (Wigler et al., Cell 11:223-232 (1977)) and adenine phosphoribosyltransferase (Lowy et al., Cell 22:817-823 (1990)) genes which can be employed in tk- or aprt-cells, respectively. Also, antimetabolite, antibiotic or herbicide resistance can be used as the basis for selection; for example, dhfr which confers resistance to methotrexate (Wigler et al., Proc. Natl. Acad. Sci. U.S.A. 77:3567-70 (1980)); npt, which confers resistance to the aminoglycosides, neomycin and G-418 (Colbere-Garapin et al., J. Mol. Biol. 150:1-14 (1981)); and als or pat, which confer resistance to chlorsulfuron and phosphinotricin acetyltransferase, respectively (Murry, supra). Additional selectable genes have been described, for example, trpB, which allows cells to utilize indole in place of tryptophan, or hisD, which allows cells to utilize histinol in place of histidine (Hartman & Mulligan, Proc. Natl. Acad. Sci. U.S.A. 85:8047-51 (1988)). The use of visible markers has gained popularity with such markers as green fluorescent protein (GFP) and other fluorescent proteins (e.g., RFP, YFP), anthocyanins, β-glucuronidase and its substrate GUS, and luciferase and its substrate luciferin, being widely used not only to identify transformants, but also to quantify the amount of transient or stable protein expression attributable to a specific vector system (see, e.g., Rhodes et al., Methods Mol. Biol. 55:121-131 (1995)).

[0256] Also included are high-throughput protein production systems, or micro-production systems. Certain aspects may utilize, for example, hexa-histidine fusion tags for protein expression and purification on metal chelate-modified slide surfaces or MagneHis Ni-Particles (see, e.g., Kwon et al., BMC Biotechnol. 9:72, 2009; and Lin et al., Methods Mol Biol. 498:129-41, 2009)). Also included are high-throughput cell-free protein expression systems (see, e.g., Sitaraman et al., Methods Mol Biol. 498:229-44, 2009).

[0257] A variety of protocols for detecting and measuring the expression of polynucleotide-encoded products, using binding agents or antibodies such as polyclonal or monoclonal antibodies specific for the product, are known in the art. Examples include enzyme-linked immunosorbent assay (ELISA), western immunoblots, radioimmunoassays (RIA), and fluorescence activated cell sorting (FACS). These and other assays are described, among other places, in Hampton et al., Serological Methods, a Laboratory Manual (1990) and Maddox et al., J. Exp. Med. 158:1211-1216 (1983).

[0258] A wide variety of labels and conjugation techniques are known by those skilled in the art and may be used in various nucleic acid and amino acid assays. Means for producing labeled hybridization or PCR probes for detecting sequences related to polynucleotides include oligolabeling, nick translation, end-labeling or PCR amplification using a labeled nucleotide. Alternatively, the sequences, or any portions thereof may be cloned into a vector for the production of an mRNA probe. Such vectors are known in the art, are commercially available, and may be used to synthesize RNA probes in vitro by addition of an appropriate RNA polymerase such as T7, T3, or SP6 and labeled nucleotides. These procedures may be conducted using a variety of commercially available kits. Suitable reporter molecules or labels, which may be used include radionuclides, enzymes, fluorescent, chemiluminescent, or chromogenic agents as well as substrates, cofactors, inhibitors, magnetic particles, and the like.

[0259] Host cells transformed with one or more polynucleotide sequences of interest may be cultured under conditions suitable for the expression and recovery of the protein from cell culture. Certain specific embodiments utilize serum free cell expression systems. Examples include HEK293 cells and CHO cells that can grown on serum free medium (see, e.g., Rosser et al., Protein Expr. Purif. 40:237-43, 2005; and U.S. Pat. No. 6,210,922).

[0260] An activatable proprotein produced by a recombinant cell may be secreted or contained intracellularly depending on the sequence and/or the vector used. As will be understood by those of skill in the art, expression vectors containing polynucleotides may be designed to contain signal sequences which direct secretion of the encoded polypeptide through a prokaryotic or eukaryotic cell membrane. Other recombinant constructions may be used to join sequences encoding a polypeptide of interest to nucleotide sequence encoding a polypeptide domain which will facilitate purification and/or detection of soluble proteins. Examples of such domains include cleavable and non-cleavable affinity purification and epitope tags such as avidin, FLAG tags, poly-histidine tags (e.g., 6×His), cMyc tags, V5-tags, glutathione S-transferase (GST) tags, and others.

[0261] The protein produced by a recombinant cell can be purified and characterized according to a variety of techniques known in the art. Exemplary systems for performing protein purification and analyzing protein purity include fast protein liquid chromatography (FPLC) (e.g., AKTA and Bio-Rad FPLC systems), high-pressure liquid chromatography (HPLC) (e.g., Beckman and Waters HPLC). Exemplary chemistries for purification include ion exchange chromatography (e.g., Q, S), size exclusion chromatography, salt gradients, affinity purification (e.g., Ni, Co, FLAG, maltose, glutathione, protein A/G), gel filtration, reverse-phase, ceramic HYPERD® ion exchange chromatography, and hydrophobic interaction columns (HIC), among others known in the art. Also included are analytical methods such as SDS-PAGE (e.g., Coomassie, silver stain), immunoblot, Bradford, and ELISA, which may be utilized during any step of the production or purification process, typically to measure the purity of the protein composition.

[0262] Also included are methods of concentrating activatable proproteins, and composition comprising concentrated soluble activatable proproteins. In some aspects, such concentrated solutions of at least one activatable proprotein comprise proteins at a concentration of about or at least about 5 mg/mL, 8 mg/mL, 10 mg/mL, 15 mg/mL, 20 mg/mL, or more.

[0263] In some aspects, such compositions may be substantially monodisperse, meaning that an activatable proprotein exists primarily (i.e., at least about 90%, or greater) in one apparent molecular weight form when assessed for example, by size exclusion chromatography, dynamic light scattering, or analytical ultracentrifugation.

[0264] In some aspects, such compositions have a purity (on a protein basis) of at least about 90%, or in some aspects at least about 95% purity, or in some embodiments, at least 98% purity. Purity may be determined via any routine analytical method as known in the art.

[0265] In some aspects, such compositions have a high molecular weight aggregate content of less than about 10%, compared to the total amount of protein present, or in some embodiments such compositions have a high molecular weight aggregate content of less than about 5%, or in some aspects such compositions have a high molecular weight aggregate content of less than about 3%, or in some embodiments a high molecular weight aggregate content of less than about 1%. High molecular weight aggregate content may be determined via a variety of analytical techniques including for example, by size exclusion chromatography, dynamic light scattering, or analytical ultracentrifugation.

[0266] Examples of concentration approaches contemplated herein include lyophilization, which is typically employed when the solution contains few soluble components other than the protein of interest. Lyophilization is often performed after HPLC run, and can remove most or all volatile components from the mixture. Also included are ultrafiltration techniques, which typically employ one or more selective permeable membranes to concentrate a protein solution. The membrane allows water and small molecules to pass through and retains the protein; the solution can be forced against the membrane by mechanical pump, gas pressure, or centrifugation, among other techniques.

[0267] In certain embodiments, an activatable proprotein in a composition has a purity of at least about 90%, as measured according to routine techniques in the art. In certain embodiments, such as diagnostic compositions or certain pharmaceutical or therapeutic compositions, an activatable proprotein composition has a purity of at least about 95%, or at least about 97% or 98% or 99%. In some embodiments, such as when being used as reference or research reagents, activatable proproteins can be of lesser purity, and may have a purity of at least about 50%, 60%, 70%, or 80%. Purity can be measured overall or in relation to selected components, such as other proteins, e.g., purity on a protein basis.

[0268] Purified activatable proproteins can also be characterized according to their biological characteristics. Binding affinity and binding kinetics can be measured according to a variety of techniques known in the art, such as Biacore® and related technologies that utilize surface plasmon resonance (SPR), an optical phenomenon that enables detection of unlabeled interactants in real time. SPR-based biosensors can be used in determination of active concentration, screening and characterization in terms of both affinity and kinetics. The presence or levels of one or more biological activities can be measured according to cell-based assays, including those that utilize at least one IL-2 receptor, which is optionally functionally coupled to a readout or indicator, such as a fluorescent or luminescent indicator of biological activity, as described herein.

[0269] In certain embodiments, as noted above, an activatable proprotein composition is substantially endotoxin free, including, for example, about 95% endotoxin free, preferably about 99% endotoxin free, and more preferably about 99.99% endotoxin free. The presence of endotoxins can be detected according to routine techniques in the art, as described herein. In specific embodiments, an activatable proprotein composition is made from a eukaryotic cell such as a mammalian or human cell in substantially serum free media. In certain embodiments, as noted herein, an activatable proprotein composition has an endotoxin content of less than about 10 EU/mg of activatable proprotein, or less than about 5 EU/mg of activatable proprotein, less than about 3 EU/mg of activatable proprotein, or less than about 1 EU/mg of activatable proprotein.

[0270] In certain embodiments, an activatable proprotein composition comprises less than about 10% wt/wt high molecular weight aggregates, or less than about 5% wt/wt high molecular weight aggregates, or less than about 2% wt/wt high molecular weight aggregates, or less than about or less than about 1% wt/wt high molecular weight aggregates.

[0271] Also included are protein-based analytical assays and methods, which can be used to assess, for example, protein purity, size, solubility, and degree of aggregation, among other characteristics. Protein purity can be assessed a number of ways. For instance, purity can be assessed based on primary structure, higher order structure, size, charge, hydrophobicity, and glycosylation. Examples of methods for assessing primary structure include N- and C-terminal sequencing and peptide-mapping (see, e.g., Allen et al., Biologicals. 24:255-275, 1996)). Examples of methods for assessing higher order structure include circular dichroism (see, e.g., Kelly et al., Biochim Biophys Acta. 1751:119-139, 2005), fluorescent spectroscopy (see, e.g., Meagher et al., J. Biol. Chem. 273:23283-89, 1998), FT-IR, amide hydrogen-deuterium exchange kinetics, differential scanning calorimetry, NMR spectroscopy, immunoreactivity with conformationally sensitive antibodies. Higher order structure can also be assessed as a function of a variety of parameters such as pH, temperature, or added salts. Examples of methods for assessing protein characteristics such as size include analytical ultracentrifugation and size exclusion HPLC (SEC-HPLC), and exemplary methods for measuring charge include ion-exchange chromatography and isolectric focusing. Hydrophobicity can be assessed, for example, by reverse-phase HPLC and hydrophobic interaction chromatography HPLC. Glycosylation can affect pharmacokinetics (e.g., clearance), conformation or stability, receptor binding, and protein function, and can be assessed, for example, by mass spectrometry and nuclear magnetic resonance (NMR) spectroscopy.

[0272] As noted above, certain embodiments include the use of SEC-HPLC to assess protein characteristics such as purity, size (e.g., size homogeneity) or degree of aggregation, and/or to purify proteins, among other uses. SEC, also including gel-filtration chromatography (GFC) and gel-permeation chromatography (GPC), refers to a chromatographic method in which molecules in solution are separated in a porous material based on their size, or more specifically their hydrodynamic volume, diffusion coefficient, and/or surface properties. The process is generally used to separate biological molecules, and to determine molecular weights and molecular weight distributions of polymers. Typically, a biological or protein sample (such as a protein extract produced according to the protein expression methods provided herein and known in the art) is loaded into a selected size-exclusion column with a defined stationary phase (the porous material), preferably a phase that does not interact with the proteins in the sample. In certain aspects, the stationary phase is composed of inert particles packed into a dense three-dimensional matrix within a glass or steel column. The mobile phase can be pure water, an aqueous buffer, an organic solvent, or a mixture thereof. The stationary-phase particles typically have small pores and/or channels which only allow molecules below a certain size to enter. Large particles are therefore excluded from these pores and channels, and their limited interaction with the stationary phase leads them to elute as a “totally-excluded” peak at the beginning of the experiment Smaller molecules, which can fit into the pores, are removed from the flowing mobile phase, and the time they spend immobilized in the stationary-phase pores depends, in part, on how far into the pores they penetrate. Their removal from the mobile phase flow causes them to take longer to elute from the column and results in a separation between the particles based on differences in their size. A given size exclusion column has a range of molecular weights that can be separated. Overall, molecules larger than the upper limit will not be trapped by the stationary phase, molecules smaller than the lower limit will completely enter the solid phase and elute as a single band, and molecules within the range will elute at different rates, defined by their properties such as hydrodynamic volume. For examples of these methods in practice with pharmaceutical proteins, see Bruner et al., Journal of Pharmaceutical and Biomedical Analysis. 15: 1929-1935, 1997.

[0273] Protein purity for clinical applications is also discussed, for example, by Anicetti et al. (Trends in Biotechnology. 7:342-349, 1989). More recent techniques for analyzing protein purity include, without limitation, the LabChip GXII, an automated platform for rapid analysis of proteins and nucleic acids, which provides high throughput analysis of titer, sizing, and purity analysis of proteins. In certain non-limiting embodiments, clinical grade activatable proproteins can be obtained by utilizing a combination of chromatographic materials in at least two orthogonal steps, among other methods (see, e.g., Therapeutic Proteins: Methods and Protocols. Vol. 308, Eds., Smales and James, Humana Press Inc., 2005). Typically, protein agents (e.g., activatable proprotein) are substantially endotoxin-free, as measured according to techniques known in the art and described herein.

[0274] Protein solubility assays are also included. Such assays can be utilized, for example, to determine optimal growth and purification conditions for recombinant production, to optimize the choice of buffer(s), and to optimize the choice of activatable proproteins and variants thereof. Solubility or aggregation can be evaluated according to a variety of parameters, including temperature, pH, salts, and the presence or absence of other additives. Examples of solubility screening assays include, without limitation, microplate-based methods of measuring protein solubility using turbidity or other measure as an end point, high-throughput assays for analysis of the solubility of purified recombinant proteins (see, e.g., Stenvall et al., Biochim Biophys Acta. 1752:6-10, 2005), assays that use structural complementation of a genetic marker protein to monitor and measure protein folding and solubility in vivo (see, e.g., Wigley et al., Nature Biotechnology. 19:131-136, 2001), and electrochemical screening of recombinant protein solubility in Escherichia coli using scanning electrochemical microscopy (SECM) (see, e.g., Nagamine et al., Biotechnology and Bioengineering. 96:1008-1013, 2006), among others. Activatable proprotein with increased solubility (or reduced aggregation) can be identified or selected for according to routine techniques in the art, including simple in vivo assays for protein solubility (see, e.g., Maxwell et al., Protein Sci. 8:1908-11, 1999).

[0275] Protein solubility and aggregation can also be measured by dynamic light scattering techniques. Aggregation is a general term that encompasses several types of interactions or characteristics, including soluble/insoluble, covalent/noncovalent, reversible/irreversible, and native/denatured interactions and characteristics. For protein therapeutics, the presence of aggregates is typically considered undesirable because of the concern that aggregates may cause an immunogenic reaction (e.g., small aggregates), or may cause adverse events on administration (e.g., particulates). Dynamic light scattering refers to a technique that can be used to determine the size distribution profile of small particles in suspension or polymers such as proteins in solution. This technique, also referred to as photon correlation spectroscopy (PCS) or quasi-elastic light scattering (QELS), uses scattered light to measure the rate of diffusion of the protein particles. Fluctuations of the scattering intensity can be observed due to the Brownian motion of the molecules and particles in solution. This motion data can be conventionally processed to derive a size distribution for the sample, wherein the size is given by the Stokes radius or hydrodynamic radius of the protein particle. The hydrodynamic size depends on both mass and shape (conformation). Dynamic scattering can detect the presence of very small amounts of aggregated protein (<0.01% by weight), even in samples that contain a large range of masses. It can also be used to compare the stability of different formulations, including, for example, applications that rely on real-time monitoring of changes at elevated temperatures. Accordingly, certain embodiments include the use of dynamic light scattering to analyze the solubility and/or presence of aggregates in a sample that contains an activatable proprotein of the present disclosure.

[0276] Although the foregoing embodiments have been described in some detail by way of illustration and example for purposes of clarity of understanding, it will be readily apparent to one of ordinary skill in the art in light of the teachings of this disclosure that certain changes and modifications may be made thereto without departing from the spirit or scope of the appended claims. The following examples are provided by way of illustration only and not by way of limitation. Those of skill in the art will readily recognize a variety of noncritical parameters that could be changed or modified to yield essentially similar results.

### EXAMPLES

### Example 1

### Engineering of “IL-2-Variant”—“Linker”—“IL-2Rα-Variant” Proproteins

[0277] To reduce stimulation of high-affinity IL-2 receptor cells (Treg, NK-CD56^{b}ng^{ht}) after activation of IL-2 proprotein homodimers, IL-2 and IL-2Rα variants were designed (see, for example, FIGS. 5A-5D). In this design, the IL-2 protein variants have reduced binding affinity to wild-type IL-2Rα relative to that of the wild-type IL-2 protein, and the IL-2Rα variants have reduced binding affinity to wild-type IL-2 relative to that of the wild-type IL-2Rα protein.

[0278] Wild-type IL-2 and IL-2 variants were expressed as fusion proteins attached to the C-terminus of a human Fc (Fc-IL-2). Wild type IL-2Rα and variants were expressed with an N-terminal His6-avi tag and then biotinylated (His-avi-IL-2Rα). Corresponding plasmids were constructed by standard gene synthesis, followed by sub-cloning into pTT5 expression vector. Illustrative proteins of Fc-IL-2 include P1988, P2131, P3132, P2133, P2134, P2135, P2136, P2137, P2138, P2139 and P2140. Illustrative proteins of His-avi-IL-2Rα include P1992, P1993, P1996, P1997, P2141, P2142, P2143, P2144 and P2145.

[0279] Single chain “IL-2-variant”—“linker”—“IL-2Rα-variant” proproteins were expressed as fusion proteins to the C-terminus of FAP antibodies (see, for example, Table S6) with a cleavable/non-cleavable linker (FAP-IL2/IL-2Rα). Corresponding plasmids were constructed by standard gene synthesis, followed by sub-cloning into pTT5 expression vector. Illustrative proteins include P22261450, P22271450, P22281450, P22291450, P22301450, P22311450, P22321450, P22331450, P22341450, P22351450, P22701450, P22711450, P22721450, P22731450, P22751450, P22841450, P22851450, P22861450, P22871450, P22881450, P22891450, P22901450, P22911450, P22921450, P22931450, P22941450, P22951450, P23022158, P23032158, P23042158, P23052158, P23062158, P23072158, P23082158, P23092158, P23102158, P23112158, P23122158 and P23132158.

[0280] Production, purification and characterization. Fc-IL-2 fusion proteins were produced by transient transfection in Expi293 cells and purified by a one-step purification of MabSelect SuRe chromatography (GE Healthcare).

[0281] His-avi-IL-2Rα proteins were produced by transient transfection in Expi293 cells and purified by a one-step purification of nickel affinity chromatography (GE Healthcare).

[0282] ELISA analysis was performed for purified Fc-IL-2 and His-avi-IL-2Rα proteins. Microtitre plates were coated with streptavidin (SA) overnight at 4° C. The next day, plates were washed with PBS and blocked with 2% BSA in PBS. His-avi-IL-2Rα proteins were added to bind to pre-coated SA. Serially diluted Fc-IL-2 were added for binding to IL-2Rα. Bound Fc-IL-2 proteins were detected with peroxidase-conjugated anti-human IgG secondary antibody (Jackson Immunoresearch). Representative ELISA results are shown in FIGS. 9A-9E.

[0283] FAP-IL2/IL-2Rα fusion proteins were produced by transient transfection in Expi293 cells and purified by a two-step purification process comprising MabSelect SuRe chromatography (GE Healthcare) and size exclusion chromatography (Superdex 200, GE Healthcare).

[0284] Purified FAP-IL2/IL-2Rα proteins were characterized by SDS-PAGE for purity assessment and showed good purity as shown in FIGS. 10A-10B.

[0285] Purified FAP-IL2/IL-2Rα proteins were also characterized by high performance liquid chromatography (HPLC) for homogeneity assessment. HPLC analysis was performed using Nanofilm SEC-250 column (Sepax) and Agilent 1260 according to the manufacturer's instructions. Representative HPLC results for the P22261450, P22271450, and P22291450 constructs are shown in FIGS. 11A-11C. Purified FAP-IL2/IL-2Rα showed one single peak, indicating good homogeneity.

[0286] Protease cleavage was performed for purified FAP-IL2/IL-2Rα proteins with the corresponding cleavage site. uPA(R&D, Cat #1310-SE-010) and MMP-2 (R&D, Cat #902-MP-010) were tested. The fusion proteins could be cleaved by uPA and MMP-2 individually or uPA and MMP2 simultaneously as shown for the P22261450, P22271450, and P22291450 constructs in FIG. 12.

[0287] Functional assays—Proliferation. Proliferation assays were performed for purified FAP-IL2/IL-2Rα proteins before and after protease cleavage. M-07e (IL-2Rβ/γc) cells were cultured in RPMI 1640 supplemented with 20% fetal bovine serum (FBS), 1% non-essential amino acids (NEAA), and 10% of 5637 cell culture supernatant. To measure cytokine-dependent cell proliferation, M-07e cells were harvested in their logarithmic growth phase and washed twice with PBS. 90 μl of cell suspension (2×10⁴ cells/well) was seeded into 96-well plate and incubated for 4 hours in assay medium (RPMI 1640 supplemented with 10% FBS and 1% NEAA) for cytokine starvation at 37° C. and 5% CO2. IL-2 and purified protein samples used in assays were prepared in assay medium to an initial concentration of 8100 nM (final concentration in assay is 810 nM), followed by ⅓ serial dilutions. 10 μl diluted protein was added into corresponding wells and incubated at 37° C. and 5% CO2 for 72 hours. Colorimetric assays using a Cell Counting Kit-8 (CCK-8, Dojindo, CK04) were performed to measure the amount of live cells.

[0288] The results for the P22261450, P22271450, and P22291450 constructs are summarized in FIGS. 13A-13C. FAP-IL2/IL-2Rα proteins showed low activity before cleavage, and then showed restored partial or full activity after uPA, MMP-2, or uPA/MMP-2 cleavage.

1. An activatable proprotein homodimer, comprising a first polypeptide and a second polypeptide, wherein:
(a) the first polypeptide and the second polypeptide comprise, in an N- to C-terminal orientation, or a C- to N-terminal orientation, a binding moiety, a first linker, an IL-2 protein variant, a second linker, and an IL-2 binding protein; or
(b) the first polypeptide and the second polypeptide comprise, in an N- to C-terminal orientation, or a C- to N-terminal orientation, a binding moiety, a first linker, an IL-2 binding protein, a second linker, and an IL-2 protein variant,
wherein the binding moiety of the first polypeptide binds to the binding moiety of the second polypeptide, wherein the IL-2 protein variant binds to the IL-2 binding protein of the second polypeptide, and wherein the IL-2 binding protein of the first polypeptide binds to the IL-2 protein variant of the second polypeptide, wherein said binding masks a binding site of IL-2 protein variant(s) that otherwise binds to an IL-2Rβ/γc and/or IL-2Rα/β/γc chain present on the surface of an immune cell in vitro or in vivo, and wherein at least one of the first or the second linker is a cleavable linker; or
(c) the first and the second polypeptide comprise, in an N- to C-terminal orientation, or a C- to N-terminal orientation, an IL-2 protein variant, a first linker, an IL-2 binding protein, a second linker, and an optional affinity purification tag; or
(d) the first and the second polypeptide comprise, in an N- to C-terminal orientation, or a C- to N-terminal orientation, an IL-2 binding protein, a first linker, an IL-2 protein variant, a second linker, and an optional affinity purification tag,
wherein the IL-2 protein variant of the first polypeptide binds to the IL-2 binding protein of the second polypeptide, and wherein the IL-2 binding protein of the first polypeptide binds to the IL-2 protein variant of the second polypeptide, wherein said binding masks a binding site of IL-2 protein variant(s) that otherwise binds to an IL-2Rβ/γc and/or IL-2Rα/β/γc chain present on the surface of an immune cell in vitro or in vivo, and wherein the first linker is a cleavable linker,
wherein the IL-2 protein variant comprises one or more amino acid alterations relative to a wild-type IL-2 sequence, and has reduced binding affinity to wild-type IL-2Rα relative to that of the wild-type IL-2 sequence.

2. The activatable proprotein homodimer of claim 1, wherein the IL-2 protein variant has a reduced binding affinity to wild-type IL-2Rα of about or at least about 2-fold, 5-fold, 10-fold, 50-fold, 100-fold, 1000-fold or more, relative to the binding affinity of the wild-type IL-2 sequence.

3. The activatable proprotein homodimer of claim 1 or 2, wherein the IL-2 protein variant comprises one or more amino acid substitutions of a positively charged amino acid to a negatively charged amino acid, and/or one or more amino acid substitutions of a negatively charged amino acid to a positively charged amino acid, optionally selected from one or more of K35D, K35E, R38D, R38E, K43D, K43E, E61K, E61R, E62K, and E62R.

4. The activatable proprotein homodimer of any one of claims 1-3, wherein the IL-2 protein variant comprises, consists, or consists essentially of an amino acid sequence that is at least 80, 85, 90, 95, 98, or 100% identical to an amino acid sequence selected from Table S1, optionally amino acids 21-153 of SEQ ID NO: 1 (full-length wild-type human IL-2), optionally comprising a C145X (X is any amino acid) or a C145S substitution as defined by SEQ ID NO: 1, and which has reduced binding affinity to wild-type IL-2Rα relative to that of the wild-type IL-2 sequence.

5. The activatable proprotein homodimer of any one of claims 1-4, wherein the IL-2 protein variant comprises, consists, or consists essentially of an amino acid sequence that is at least 80, 85, 90, 95, 98, or 100% identical to SEQ ID NO: 2 (mature human IL-2 with C125S substitution), optionally wherein the IL-2 protein retains the 5125 residue as defined by SEQ ID NO: 2, optionally wherein the IL-2 protein variant comprises or retains any one or more of K35D, K35E, R38D, R38E, K43D, K43E, E61K, E61R, E62K, and E62R substitutions as defined by SEQ ID NO: 2, and which has reduced binding affinity to wild-type IL-2Rα relative to that of the wild-type IL-2 sequence.

6. The activatable proprotein homodimer of any one of claims 1-5, wherein the IL-2 protein variant comprises, consists, or consists essentially of an amino acid sequence that is at least 80, 85, 90, 95, 98, or 100% identical to SEQ ID NO: 3 (mature human IL-2 “D10” variant), optionally wherein the IL-2 protein retains any one or more of the Q74H, L80F, R81D, L85V, I86V, and/or I92F substitutions as defined by SEQ ID NO: 3, optionally wherein the IL-2 protein variant comprises or retains any one or more of K35D, K35E, R38D, R38E, K43D, K43E, E61K, E61R, E62K, and E62R substitutions as defined by SEQ ID NO: 3, and which has reduced binding affinity to wild-type IL-2Rα relative to that of the wild-type IL-2 sequence.

7. The activatable proprotein homodimer of any one of claims 1-6, wherein the IL-2 protein variant comprises one or more amino acid substitutions at residues selected from A1, P2, A3, S4, and S5, as defined by SEQ ID NO: 2 or 3, or comprises N-terminal deletion of 1, 2, 3, 4, or 5 amino acids, as defined by SEQ ID NO: 2 or 3.

8. The activatable proprotein homodimer of any one of claims 1-7, wherein the IL-2 binding protein is an IL-2Rα protein variant that comprises one or more amino acid alterations relative to a wild-type IL-2Rα sequence, and has reduced binding affinity to wild-type IL-2 relative to that of the wild-type IL-2Rα sequence.

9. The activatable proprotein homodimer of claim 8, wherein the IL-2Rα protein variant comprises one or more amino acid substitutions of a positively charged amino acid to a negatively charged amino acid, and/or one or more amino acid substitutions of a negatively charged amino acid to a positively charged amino acid, optionally selected from one or more of D4R, D4K, D6R, D6K, E29R, E29K, K38D, K38E, R36D, and R36E, as defined by SEQ ID NO: 6.

10. The activatable proprotein homodimer of claim 8 or 9, wherein the IL-2Rα protein variant comprises, consists, or consists essentially of an amino acid sequence selected from Table S2, optionally amino acids 22-187 of SEQ ID NO: 4, or an active variant or fragment thereof that is at least 80, 85, 90, 95, 98, or 100% identical to a sequence selected from Table S2, and optionally comprises or retains one or more amino acid substitutions selected from D4R, D4K, D6R, D6K, E29R, E29K, K38D, K38E, R36D, and R36E, as defined by SEQ ID NO: 6.

11. The activatable proprotein homodimer of any one of claims 8-10, wherein the IL-2Rα protein variant comprises one or more substitutions selected from D4C, DSC, D6C, E29C, R36C, and K38C, which enhance the stability of the proprotein homodimer.

12. The activatable proprotein homodimer of any one of claims 8-11, wherein the IL-2 protein variant/IL-2Rα protein variant comprise one or more corresponding amino acid substitution pairs selected from:
R38D/D6R, and K43E/E29A;
R38D/D6R, K43E/E29K, and F42A of IL-2;
E61K/K38E, and K43E/E29K, and F42A of IL-2;
K35D/D4R, K35D/D4K, K35E/D4R, and K35E/D4K;
R38D/D6R, R38D/D6K, R38E/D6R, and R38E/D6K;
K43D/E29R, K43D/E29K, K43E/E29R, and K43E/E29K;
E61K/K38D, E61K/K38E, E61R/K38D, and E61R/K38E; and
E62K/R36D, E62K/R36E, E62R/R36D, and E62R/R36E.

13. The activatable proprotein homodimer of any one of claims 8-12, wherein the IL-2 protein variant and the IL-2Rα protein variant have a binding affinity for each other that is lower than the binding affinity between wild-type IL-2 and wild-type IL-2Rα.

14. The activatable proprotein homodimer of claim 13, wherein the IL-2 protein variant and the IL-2Rα protein variant have a binding affinity for each other that is lower than the binding affinity between wild-type IL-2 and wild-type IL-2Rα by about or at least about 2-fold, 5-fold, 10-fold, 50-fold, 100-fold, 1000-fold or more.

15. The activatable proprotein homodimer of any one of claims 1-14, wherein the binding moieties of (a) and/or (b) do not bind to the IL-2 protein variant or the IL-2 binding protein.

16. The activatable proprotein homodimer of any one of claims 1-14, wherein the binding moieties of (a) and/or (b) bind to the IL-2 protein variant.

17. The activatable proprotein homodimer of any one of claims 1-16, wherein the binding moieties of the first polypeptide and the second polypeptide of (a) and/or (b) bind together, optionally homodimerize, via at least one non-covalent interaction.

18. The activatable proprotein homodimer of any one of claims 1-17, wherein the binding moieties of the first polypeptide and the second polypeptide of (a) and/or (b) bind together, optionally homodimerize, via at least one covalent bond.

19. The activatable proprotein homodimer of claim 18, wherein the at least one covalent bond comprises at least one disulfide bond.

20. The activatable proprotein homodimer of any one of claims 1-19, wherein the binding moieties of the first polypeptide and the second polypeptide of (a) and/or (b) are selected from Table M1.

21. The activatable proprotein homodimer of any one of claims 1-20, wherein the binding moieties of the first polypeptide and the second polypeptide of (a) or (b) comprise an antigen binding domain of an immunoglobulin, including antigen binding fragments and variants thereof.

22. The activatable proprotein of any one of claims 1-21, wherein the binding moieties of the first polypeptide and the second polypeptide of (a) and/or (b) comprise a CH1, CH2, CH3, CH1CH3, CH2CH3, CH1CH2CH3, and/or CL domain of an immunoglobulin, including fragments and variants thereof.

23. The activatable proprotein homodimer of claim 21 or 22, wherein the binding moieties of the first polypeptide and the second polypeptide of (a) and/or (b) comprise, in an N- to C-terminal orientation: (1) an antigen binding domain of an immunoglobulin, including antigen binding fragments and variants thereof; and (2) a CH1, CH2, CH3, CH1CH3, CH2CH3, CH1CH2CH3, and/or CL domain of an immunoglobulin, including fragments and variants thereof.

24. The activatable proprotein homodimer of any one of claims 21-23, wherein the antigen binding domain comprises a VH or VL domain of an immunoglobulin, including antigen binding fragments and variants thereof.

25. The activatable proprotein homodimer of any one of claims 1-24, wherein the binding moieties of the first polypeptide and the second polypeptide of (a) and/or (b) do not bind to an antigen.

26. The activatable proprotein homodimer of any one of claims 1-25, wherein the binding moieties of the first polypeptide and the second polypeptide of (a) and/or (b) comprise a CH2CH3 domain of an immunoglobulin.

27. The activatable proprotein homodimer of any one of claims 21-26, wherein the immunoglobulin is from an immunoglobulin class selected from IgG1, IgG2, IgG3, IgG4, IgA, IgD, IgE, and IgM.

29. The activatable proprotein homodimer of any one of claims 1-28, wherein the binding moieties of the first polypeptide and the second polypeptide of (a) and/or (b) comprise a leucine zipper peptide.

30. The activatable proprotein homodimer of any one of claims 1-29, wherein the affinity purification tag of (c) and/or (d) is selected from a polyhistidine tag (optionally hexahistidine tag), a VSV-G tag, a universal tag, a Strep-tag, an S-tag, an S1-tag, a Phe-tag, a Cys-tag, an Asp-tag, an Arg-tag, a Myc epitope tag, a KT3 epitope tag, an HSV epitope tag, a histidine affinity tag, a hemagglutinin (HA) tag, a FLAG epitope tag, an E2 epitope tag, a V5-tag, a T7-tag, an AU5 epitope tag, and an AU1 epitope tag.

31. The activatable proprotein homodimer of any one of claims 1-30, wherein the cleavable linker comprises a protease cleavage site, optionally wherein the cleavable linker is selected from Table S3.

32. The activatable proprotein homodimer of claim 31, wherein the protease cleavage site is cleavable by a protease selected from one or more of a metalloprotease, a serine protease, a cysteine protease, and an aspartic acid protease.

33. The activatable proprotein homodimer of claim 31 or 32, wherein protease cleavage site is cleavable by a protease selected from one or more of MMP1, MMP2, MMP3, MMP4, MMP5, MMP6, MMP7, MMP8, MMP9, MMP10, MMP11, MMP12, MMP13, MMP14, TEV protease, matriptase, uPA, FAP, Legumain, PSA, Kallikrein, Cathepsin A, and Cathepsin B.

34. The activatable proprotein homodimer of any one of claims 1-33, wherein the first linker and/or the second linker are about 1-50 1-40, 1-30, 1-20, 1-10, 1-5, 1-4, 1-3 amino acids in length, or about 1, 2, 3, 4, 5, 6, 7, 8, 9, 10, 11, 12, 13, 14, 15, 16, 17, 18, 19, 20, 21, 22, 23, 24, 25, 26, 27, 28, 29, 30, 31, 32, 33, 34, 35, 36, 37, 38, 39, 40, 41, 42, 43, 44, 45, 46, 47, 48, 49, 50 amino acids in length.

35. The activatable proprotein homodimer of any one of claims 1-34, wherein the first linker of (a) and/or (b) is a cleavable linker, and wherein the second linker of (a) and/or (b) is a non-cleavable linker.

36. The activatable proprotein homodimer of claim 35, wherein cleavage, optionally protease cleavage, of the first linker of (a) and/or (b) exposes the binding site(s) of the first and/or second IL-2 protein variants that bind to the IL-2Rβ/γc chain present on the surface of the immune cell in vitro or in vivo.

37. The activatable proprotein homodimer of any one of claims 1-34, wherein the first linker of (a) and/or (b) is a non-cleavable linker, and wherein the second linker of (a) and/or (b) is a cleavable linker.

38. The activatable proprotein homodimer of claim 37, wherein cleavage, optionally protease cleavage, of the second linker of (a) and/or (b) exposes the binding site(s) of the first and/or second IL-2 protein variants that bind to the IL-2Rβ/γc chain present on the surface of the immune cell in vitro or in vivo.

39. The activatable proprotein homodimer of any one of claims 1-34, wherein cleavage, optionally protease cleavage, of the first linker of (c) and/or (d) exposes the binding site(s) of the first and/or second IL-2 protein variants that bind to the IL-2Rβ/γc chain present on the surface of the immune cell in vitro or in vivo.

40. The activatable proprotein homodimer of any one of claims 1-39, wherein the immune cell is selected from one or more of a T cell, a B cell, a natural killer cell, a monocyte, and a macrophage.

41. The activatable proprotein homodimer of any one of claims 1-40, wherein the first polypeptide and the second polypeptide of (a) comprise, in an N- to C-terminal orientation, the binding moiety, the first linker, the IL-2 protein variant, the second linker, and the IL-2 binding protein.

42. The activatable proprotein homodimer of any one of claims 1-40, wherein the first polypeptide and the second polypeptide of (a) comprise, in an N- to C-terminal orientation, the IL-2 binding protein, the first linker, the IL-2 protein variant, the second linker, and the binding moiety.

43. The activatable proprotein homodimer of any one of claims 1-40, wherein the first polypeptide and the second polypeptide of (b) comprise, in an N- to C-terminal orientation, the binding moiety, the first linker, the IL-2 binding protein, the second linker, and the IL-2 protein variant.

44. The activatable proprotein homodimer of any one of claims 1-40, wherein the first polypeptide and the second polypeptide of (b) comprise, in an N- to C-terminal orientation, the IL-2 protein, the first linker, the IL-2 binding protein variant, the second linker, and the binding moiety.

45. The activatable proprotein homodimer of any one of claims 1-40, wherein the first polypeptide and the second polypeptide of (c) comprise, in an N- to C-terminal orientation, the IL-2 protein variant, the first linker, the IL-2 binding protein, the second linker, and the affinity purification tag.

46. The activatable proprotein homodimer of any one of claims 1-40, wherein the first polypeptide and the second polypeptide of (d) comprise, in an N- to C-terminal orientation, the IL-2 binding protein, the first linker, the IL-2 protein variant, the second linker, and the affinity purification tag.

47. The activatable proprotein homodimer of any one of claims 1-46, wherein the first polypeptide and the second polypeptide comprise, consist, or consist essentially of an amino acid sequence that is at least 80, 85, 90, 95, 98, or 100% identical to a sequence selected from Tables S4-S6.

48. The activatable proprotein homodimer of any one of claims 1-47, which is substantially in homodimeric form in a physiological solution, or under physiological conditions, optionally in vivo conditions.

49. A recombinant nucleic acid molecule encoding the activatable proprotein homodimer of any one of claims 1-48.

50. A vector comprising the recombinant nucleic acid molecule of claim 49.

51. A host cell comprising the recombinant nucleic acid molecule of claim 44 or the vector of claim 50.

52. A method of producing an activatable proprotein, comprising culturing the host cell of claim 51 under culture conditions suitable for the expression of the activatable proprotein homodimer, and isolating the activatable proprotein from the culture.

53. A pharmaceutical composition, comprising the activatable proprotein homodimer of any one of claims 1-48, and a pharmaceutically acceptable carrier.

54. A method of treating disease in a subject, and/or a method of enhancing an immune response in a subject, comprising administering to the subject a therapeutically effective amount of the pharmaceutical composition of claim 53.

55. The method of claim 54, wherein the disease is selected from one or more of a cancer, a viral infection, and an immune disorder.

56. The method of claim 55, wherein the cancer is a primary cancer or a metastatic cancer, and is selected from one or more of melanoma (optionally metastatic melanoma), kidney cancer (optionally renal cell carcinoma), pancreatic cancer, bone cancer, prostate cancer, small cell lung cancer, non-small cell lung cancer (NSCLC), mesothelioma, leukemia (optionally lymphocytic leukemia, chronic myelogenous leukemia, acute myeloid leukemia, or relapsed acute myeloid leukemia), multiple myeloma, lymphoma, hepatoma (hepatocellular carcinoma), sarcoma, B-cell malignancy, breast cancer, ovarian cancer, colorectal cancer, glioma, glioblastoma multiforme, meningioma, pituitary adenoma, vestibular schwannoma, primary CNS lymphoma, primitive neuroectodermal tumor (medulloblastoma), bladder cancer, uterine cancer, esophageal cancer, brain cancer, head and neck cancers, cervical cancer, testicular cancer, thyroid cancer, and stomach cancer.

57. The method of any one of claims 54-56, wherein following administration, the activatable proprotein homodimer is activated through protease cleavage in a cell or tissue, optionally a cancer cell or cancer tissue, which exposes the binding site(s) of the first and/or second IL-2 proteins that bind to the IL-2Rβ/γc chain present on the surface of the immune cell in vitro or in vivo, and thereby generates an activated protein.

58. The method of claim 57, wherein the activated protein binds via the IL-2 protein to the IL-2Rβ/γc chain present on the surface of an immune cell in vitro or in vivo.

59. The method of claim 58, wherein the immune cell is selected from one or more of a T cell, a B cell, a natural killer cell, a monocyte, and a macrophage.

60. The method of any one of claims 57-59, wherein binding between the IL-2 protein(s) and the IL-2 binding protein(s) (optionally disulfide binding between the IL-2 protein(s) and the IL-2Rα protein(s)) in the activated protein masks the binding site of the IL-2 protein(s) that binds to the IL-2Rα/β/γc chain expressed on T_{regs}, and thereby interferes with binding of the activated protein to T_{regs}.

61. The method of any one of claims 54-60, wherein administration and activation of the activatable proprotein increases an immune response in the subject by about or at least about 5, 10, 15, 20, 25, 30, 35, 40, 45, 50, 60, 70, 80, 90, 100, 200, 300, 400, 500, 600, 700, 800, 900, 1000, 2000% or more, relative to a control, optionally wherein the immune response is an anti-cancer or anti-viral immune response.

62. The method of any one of claims 54-61, wherein administration and activation of the activatable proprotein increases cell-killing in the subject by about or at least about 5, 10, 15, 20, 25, 30, 35, 40, 45, 50, 60, 70, 80, 90, 100, 200, 300, 400, 500, 600, 700, 800, 900, 1000, 2000% or more, relative to a control, optionally wherein the cell-killing is cancer cell-killing or virally-infected cell-killing.

63. The method of claim 55, wherein the viral infection is selected from one or more of human immunodeficiency virus (HIV), Hepatitis A, Hepatitis B, Hepatitis C, Hepatitis E, Caliciviruses associated diarrhoea, Rotavirus diarrhoea, Haemophilus influenzae B pneumonia and invasive disease, influenza, measles, mumps, rubella, Parainfluenza associated pneumonia, Respiratory syncytial virus (RSV) pneumonia, Severe Acute Respiratory Syndrome (SARS), Human papillomavirus, Herpes simplex type 2 genital ulcers, Dengue Fever, Japanese encephalitis, Tick-borne encephalitis, West-Nile virus associated disease, Yellow Fever, Epstein-Barr virus, Lassa fever, Crimean-Congo haemorrhagic fever, Ebola haemorrhagic fever, Marburg haemorrhagic fever, Rabies, Rift Valley fever, Smallpox, upper and lower respiratory infections, and poliomyelitis, optionally wherein the subject is HIV-positive.

64. The method of claim 55, wherein the immune disorder is selected from one or more of type 1 diabetes, vasculitis, and an immunodeficiency.

65. The method of any one of claims 54-64, wherein the pharmaceutical composition is administered to the subject by parenteral administration.

66. The method of claim 65, wherein the parenteral administration is intravenous administration.

67. The method of claim any one of claims 54-66, wherein the disease is a cancer, and wherein the method further comprises administering a chimeric antigen receptor (CAR)-modified immune cell to the subject, optionally a CAR-modified T-cell, natural killer (NK) cell, or induced pluripotent stem cell-derived lymphocyte, wherein the CAR-modified immune cell is modified to express an exogenous IL-2Rα protein variant as defined in any one of claims 1-14, which binds to the IL-2 protein variant as defined in any one of claims 1-14.

68. The method of claim 67, wherein the IL-2 protein variant has a reduced binding affinity to wild-type IL-2Rα present on endogenous cells in the subject of about or at least about 2-fold, 5-fold, 10-fold, 50-fold, 100-fold, 1000-fold or more, relative to the binding affinity of the wild-type IL-2 sequence.

69. The method of any one of claims 54-66, wherein the disease is a cancer, and wherein the method comprises administering an adoptive cell therapy (ACT), wherein the adoptively transferred cells are modified to express an exogenous IL-2Rα protein variant that binds to the IL-2 protein variant as defined in any one of claims 1-10.

70. Use of a pharmaceutical composition of claim 53 in the preparation of a medicament for treating a disease in a subject, and/or for enhancing an immune response in a subject.

71. A pharmaceutical composition of claim 53 for use in treating a disease in a subject, and/or for enhancing an immune response in a subject.

The application's sequence listing, which the Patent Office published only in electronic form, follows.

SEQUENCE LISTING (354 sequences)

SEQ ID NO: 1 - protein, 153 aa, Homo sapiens
MYRMQLLSCIALSLALVTNSAPTSSSTKKTQLQLEHLLLDLQMILNGINNYKNPKLTRMLTFKFYMPKKATELKHLQCLEEELKPLEEVLNLAQSKNFHLRPRDLISNINVIVLELKGSETTFMCEYADETATIVEFLNRWITFCQSIISTLT

SEQ ID NO: 2 - protein, 133 aa, Artificial Sequence
  Human IL-2 mature form with C125S alteration
APTSSSTKKTQLQLEHLLLDLQMILNGINNYKNPKLTRMLTFKFYMPKKATELKHLQCLEEELKPLEEVLNLAQSKNFHLRPRDLISNINVIVLELKGSETTFMCEYADETATIVEFLNRWITFSQSIISTLT

SEQ ID NO: 3 - protein, 133 aa, Artificial Sequence
  Human IL-2 mature form with Q74H,L80F,R81D,L85V, I86V, and I92F alterations
APTSSSTKKTQLQLEHLLLDLQMILNGINNYKNPKLTRMLTFKFYMPKKATELKHLQCLEEELKPLEEVLNLAHSKNFHFDPRDVVSNINVFVLELKGSETTFMCEYADETATIVEFLNRWITFCQSIISTLT

SEQ ID NO: 4 - protein, 272 aa, Homo sapiens
MDSYLLMWGLLTFIMVPGCQAELCDDDPPEIPHATFKAMAYKEGTMLNCECKRGFRRIKSGSLYMLCTGNSSHSSWDNQCQCTSSATRNTTKQVTPQPEEQKERKTTEMQSPMQPVDQASLPGHCREPPPWENEATERIYHFVVGQMVYYQCVQGYRALHRGPAESVCKMTHGKTRWTQPQLICTGEMETSQFPGEEKPQASPEGRPESETSCLVTTTDFQIQTEMAATMETSIFTTEYQVAVAGCVFLLISVLLLSGLTWQRRQRKSRRTI

SEQ ID NO: 5 - protein, 219 aa, Homo sapiens
ELCDDDPPEIPHATFKAMAYKEGTMLNCECKRGFRRIKSGSLYMLCTGNSSHSSWDNQCQCTSSATRNTTKQVTPQPEEQKERKTTEMQSPMQPVDQASLPGHCREPPPWENEATERIYHFVVGQMVYYQCVQGYRALHRGPAESVCKMTHGKTRWTQPQLICTGEMETSQFPGEEKPQASPEGRPESETSCLVTTTDFQIQTEMAATMETSIFTTEYQ

SEQ ID NO: 6 - protein, 166 aa, Homo sapiens
ELCDDDPPEIPHATFKAMAYKEGTMLNCECKRGFRRIKSGSLYMLCTGNSSHSSWDNQCQCTSSATRNTTKQVTPQPEEQKERKTTEMQSPMQPVDQASLPGHCREPPPWENEATERIYHFVVGQMVYYQCVQGYRALHRGPAESVCKMTHGKTRWTQPQLICTGE

SEQ ID NO: 7 - protein, 128 aa, Artificial Sequence
  Human IL-2 mature form with R38E_K43E alterations
STKKTQLQLEHLLLDLQMILNGINNYKNPKLTEMLTFEFYMPKKATELKHLQCLEEELKPLEEVLNLAQSKNFHLRPRDLISNINVIVLELKGSETTFMCEYADETATIVEFLNRWITFCQSIISTLT

SEQ ID NO: 8 - protein, 128 aa, Artificial Sequence
  Human IL-2 mature form with R38E_E61K alterations
STKKTQLQLEHLLLDLQMILNGINNYKNPKLTEMLTFKFYMPKKATELKHLQCLEKELKPLEEVLNLAQSKNFHLRPRDLISNINVIVLELKGSETTFMCEYADETATIVEFLNRWITFCQSIISTLT

SEQ ID NO: 9 - protein, 128 aa, Artificial Sequence
  Human IL-2 mature form with R38E_E62K alterations
STKKTQLQLEHLLLDLQMILNGINNYKNPKLTEMLTFKFYMPKKATELKHLQCLEEKLKPLEEVLNLAQSKNFHLRPRDLISNINVIVLELKGSETTFMCEYADETATIVEFLNRWITFCQSIISTLT

SEQ ID NO: 10 - protein, 128 aa, Artificial Sequence
  Human IL-2 mature form with R38E_K43E_E61K alterations
STKKTQLQLEHLLLDLQMILNGINNYKNPKLTEMLTFEFYMPKKATELKHLQCLEKELKPLEEVLNLAQSKNFHLRPRDLISNINVIVLELKGSETTFMCEYADETATIVEFLNRWITFCQSIISTLT

SEQ ID NO: 11 - protein, 128 aa, Artificial Sequence
  Human IL-2 mature form with R38E_K43E_E62K alterations
STKKTQLQLEHLLLDLQMILNGINNYKNPKLTEMLTFEFYMPKKATELKHLQCLEEKLKPLEEVLNLAQSKNFHLRPRDLISNINVIVLELKGSETTFMCEYADETATIVEFLNRWITFCQSIISTLT

SEQ ID NO: 12 - protein, 128 aa, Artificial Sequence
  Human IL-2 mature form with R38E_E61K_E62K alterations
STKKTQLQLEHLLLDLQMILNGINNYKNPKLTEMLTFKFYMPKKATELKHLQCLEKKLKPLEEVLNLAQSKNFHLRPRDLISNINVIVLELKGSETTFMCEYADETATIVEFLNRWITFCQSIISTLT

SEQ ID NO: 13 - protein, 128 aa, Artificial Sequence
  Human IL-2 mature form with R38E_K43E_E61K_E62K alterations
STKKTQLQLEHLLLDLQMILNGINNYKNPKLTEMLTFEFYMPKKATELKHLQCLEKKLKPLEEVLNLAQSKNFHLRPRDLISNINVIVLELKGSETTFMCEYADETATIVEFLNRWITFCQSIISTLT

SEQ ID NO: 14 - protein, 128 aa, Artificial Sequence
  Human IL-2 mature form with V69A, Q74P and I128T R38E_K43E_E62K alterations
STKKTQLQLEHLLLDLQMILNGINNYKNPKLTEMLTFEFYMPKKATELKHLQCLEEKLKPLEEALNLAPSKNFHLRPRDLISNINVIVLELKGSETTFMCEYADETATIVEFLNRWITFCQSTISTLT

SEQ ID NO: 15 - protein, 128 aa, Artificial Sequence
  Human IL-2 mature form with V69A, Q74P and I128T_R38E_E61K_E62K alterations
STKKTQLQLEHLLLDLQMILNGINNYKNPKLTEMLTFKFYMPKKATELKHLQCLEKKLKPLEEALNLAPSKNFHLRPRDLISNINVIVLELKGSETTFMCEYADETATIVEFLNRWITFCQSTISTLT

SEQ ID NO: 16 - protein, 128 aa, Artificial Sequence
  Human IL-2 mature form with V69A, Q74P and I128T_ R38E_K43E_E61K_E62K alterations
STKKTQLQLEHLLLDLQMILNGINNYKNPKLTEMLTFEFYMPKKATELKHLQCLEKKLKPLEEALNLAPSKNFHLRPRDLISNINVIVLELKGSETTFMCEYADETATIVEFLNRWITFCQSTISTLT

SEQ ID NO: 17 - protein, 133 aa, Artificial Sequence
  Human IL-2 mature form with Y45A alteration
APTSSSTKKTQLQLEHLLLDLQMILNGINNYKNPKLTRMLTFKFAMPKKATELKHLQCLEEELKPLEEVLNLAQSKNFHLRPRDLISNINVIVLELKGSETTFMCEYADETATIVEFLNRWITFCQSIISTLT

SEQ ID NO: 18 - protein, 133 aa, Artificial Sequence
  Human IL-2 mature form F42A and Y45A alterations
APTSSSTKKTQLQLEHLLLDLQMILNGINNYKNPKLTRMLTAKFAMPKKATELKHLQCLEEELKPLEEVLNLAQSKNFHLRPRDLISNINVIVLELKGSETTFMCEYADETATIVEFLNRWITFCQSIISTLT

SEQ ID NO: 19 - protein, 133 aa, Artificial Sequence
  Human IL-2 mature form with E61S alteration
APTSSSTKKTQLQLEHLLLDLQMILNGINNYKNPKLTRMLTFKFYMPKKATELKHLQCLESELKPLEEVLNLAQSKNFHLRPRDLISNINVIVLELKGSETTFMCEYADETATIVEFLNRWITFCQSIISTLT

SEQ ID NO: 20 - protein, 133 aa, Artificial Sequence
  Human IL-2 mature form with T3A alteration
APASSSTKKTQLQLEHLLLDLQMILNGINNYKNPKLTRMLTFKFYMPKKATELKHLQCLEEELKPLEEVLNLAQSKNFHLRPRDLISNINVIVLELKGSETTFMCEYADETATIVEFLNRWITFCQSIISTLT

SEQ ID NO: 21 - protein, 133 aa, Artificial Sequence
  Human IL-2 mature form with R38E_T3A alterations
APASSSTKKTQLQLEHLLLDLQMILNGINNYKNPKLTEMLTFKFYMPKKATELKHLQCLEEELKPLEEVLNLAQSKNFHLRPRDLISNINVIVLELKGSETTFMCEYADETATIVEFLNRWITFCQSIISTLT

SEQ ID NO: 22 - protein, 133 aa, Artificial Sequence
  Human IL-2 mature form with R38D_T3A alterations
APASSSTKKTQLQLEHLLLDLQMILNGINNYKNPKLTDMLTFKFYMPKKATELKHLQCLEEELKPLEEVLNLAQSKNFHLRPRDLISNINVIVLELKGSETTFMCEYADETATIVEFLNRWITFCQSIISTLT

SEQ ID NO: 23 - protein, 133 aa, Artificial Sequence
  Human IL-2 mature form with K43E_T3A alterations
APASSSTKKTQLQLEHLLLDLQMILNGINNYKNPKLTRMLTFEFYMPKKATELKHLQCLEEELKPLEEVLNLAQSKNFHLRPRDLISNINVIVLELKGSETTFMCEYADETATIVEFLNRWITFCQSIISTLT

SEQ ID NO: 24 - protein, 133 aa, Artificial Sequence
  Human IL-2 mature form with E61K_T3A alterations
APASSSTKKTQLQLEHLLLDLQMILNGINNYKNPKLTRMLTFKFYMPKKATELKHLQCLEKELKPLEEVLNLAQSKNFHLRPRDLISNINVIVLELKGSETTFMCEYADETATIVEFLNRWITFCQSIISTLT

SEQ ID NO: 25 - protein, 133 aa, Artificial Sequence
  Human IL-2 mature form with E61R_T3A alterations
APASSSTKKTQLQLEHLLLDLQMILNGINNYKNPKLTRMLTFKFYMPKKATELKHLQCLERELKPLEEVLNLAQSKNFHLRPRDLISNINVIVLELKGSETTFMCEYADETATIVEFLNRWITFCQSIISTLT

SEQ ID NO: 26 - protein, 133 aa, Artificial Sequence
  Human IL-2 mature form with E62K_T3A alterations
APASSSTKKTQLQLEHLLLDLQMILNGINNYKNPKLTRMLTFKFYMPKKATELKHLQCLEEKLKPLEEVLNLAQSKNFHLRPRDLISNINVIVLELKGSETTFMCEYADETATIVEFLNRWITFCQSIISTLT

SEQ ID NO: 27 - protein, 133 aa, Artificial Sequence
  Human IL-2 mature form with E62R_T3A alterations
APASSSTKKTQLQLEHLLLDLQMILNGINNYKNPKLTRMLTFKFYMPKKATELKHLQCLEERLKPLEEVLNLAQSKNFHLRPRDLISNINVIVLELKGSETTFMCEYADETATIVEFLNRWITFCQSIISTLT

SEQ ID NO: 28 - protein, 133 aa, Artificial Sequence
  Human IL-2 mature form with R38E_K43E_T3A alterations
APASSSTKKTQLQLEHLLLDLQMILNGINNYKNPKLTEMLTFEFYMPKKATELKHLQCLEEELKPLEEVLNLAQSKNFHLRPRDLISNINVIVLELKGSETTFMCEYADETATIVEFLNRWITFCQSIISTLT

SEQ ID NO: 29 - protein, 133 aa, Artificial Sequence
  Human IL-2 mature form with R38D_K43E_T3A alterations
APASSSTKKTQLQLEHLLLDLQMILNGINNYKNPKLTDMLTFEFYMPKKATELKHLQCLEEELKPLEEVLNLAQSKNFHLRPRDLISNINVIVLELKGSETTFMCEYADETATIVEFLNRWITFSQSIISTLT

SEQ ID NO: 30 - protein, 133 aa, Artificial Sequence
  Human IL-2 mature form with R38E_E61K_T3A alterations
APASSSTKKTQLQLEHLLLDLQMILNGINNYKNPKLTEMLTFKFYMPKKATELKHLQCLEKELKPLEEVLNLAQSKNFHLRPRDLISNINVIVLELKGSETTFMCEYADETATIVEFLNRWITFCQSIISTLT

SEQ ID NO: 31 - protein, 133 aa, Artificial Sequence
  Human IL-2 mature form R38D_E61K_T3A alterations
APASSSTKKTQLQLEHLLLDLQMILNGINNYKNPKLTDMLTFKFYMPKKATELKHLQCLEKELKPLEEVLNLAQSKNFHLRPRDLISNINVIVLELKGSETTFMCEYADETATIVEFLNRWITFCQSIISTLT

SEQ ID NO: 32 - protein, 133 aa, Artificial Sequence
  Human IL-2 mature form with K43E_E61K_T3A alteration
APASSSTKKTQLQLEHLLLDLQMILNGINNYKNPKLTRMLTFEFYMPKKATELKHLQCLEKELKPLEEVLNLAQSKNFHLRPRDLISNINVIVLELKGSETTFMCEYADETATIVEFLNRWITFCQSIISTLT

SEQ ID NO: 33 - protein, 133 aa, Artificial Sequence
  Human IL-2 mature form with R38D_K43E_E61K_T3A alterations
APASSSTKKTQLQLEHLLLDLQMILNGINNYKNPKLTDMLTFEFYMPKKATELKHLQCLEKELKPLEEVLNLAQSKNFHLRPRDLISNINVIVLELKGSETTFMCEYADETATIVEFLNRWITFCQSIISTLT

SEQ ID NO: 34 - protein, 133 aa, Artificial Sequence
  Human IL-2 mature form with R38D_F42A_K43E_T3A alterations
APASSSTKKTQLQLEHLLLDLQMILNGINNYKNPKLTDMLTAEFYMPKKATELKHLQCLEEELKPLEEVLNLAQSKNFHLRPRDLISNINVIVLELKGSETTFMCEYADETATIVEFLNRWITFCQSIISTLT

SEQ ID NO: 35 - protein, 133 aa, Artificial Sequence
  Human IL-2 mature form with F42A_K43E_E61K_T3A alterations
APASSSTKKTQLQLEHLLLDLQMILNGINNYKNPKLTRMLTAEFYMPKKATELKHLQCLEKELKPLEEVLNLAQSKNFHLRPRDLISNINVIVLELKGSETTFMCEYADETATIVEFLNRWITFCQSIISTLT

SEQ ID NO: 36 - protein, 166 aa, Artificial Sequence
  Human IL-2Ralpha-sushi (22-187) with D6K_E29K alterations
ELCDDKPPEIPHATFKAMAYKEGTMLNCKCKRGFRRIKSGSLYMLCTGNSSHSSWDNQCQCTSSATRNTTKQVTPQPEEQKERKTTEMQSPMQPVDQASLPGHCREPPPWENEATERIYHFVVGQMVYYQCVQGYRALHRGPAESVCKMTHGKTRWTQPQLICTGE

SEQ ID NO: 37 - protein, 166 aa, Artificial Sequence
  Human IL-2Ralpha-sushi (22-187) with D6K_K38E alterations
ELCDDKPPEIPHATFKAMAYKEGTMLNCECKRGFRRIESGSLYMLCTGNSSHSSWDNQCQCTSSATRNTTKQVTPQPEEQKERKTTEMQSPMQPVDQASLPGHCREPPPWENEATERIYHFVVGQMVYYQCVQGYRALHRGPAESVCKMTHGKTRWTQPQLICTGE

SEQ ID NO: 38 - protein, 166 aa, Artificial Sequence
  Human IL-2Ralpha-sushi (22-187) with D6K_R36E alterations
ELCDDKPPEIPHATFKAMAYKEGTMLNCECKRGFREIKSGSLYMLCTGNSSHSSWDNQCQCTSSATRNTTKQVTPQPEEQKERKTTEMQSPMQPVDQASLPGHCREPPPWENEATERIYHFVVGQMVYYQCVQGYRALHRGPAESVCKMTHGKTRWTQPQLICTGE

SEQ ID NO: 39 - protein, 166 aa, Artificial Sequence
  Human IL-2Ralpha-sushi (22-187) with D6K_E29K_K38E alterations
ELCDDKPPEIPHATFKAMAYKEGTMLNCKCKRGFRRIESGSLYMLCTGNSSHSSWDNQCQCTSSATRNTTKQVTPQPEEQKERKTTEMQSPMQPVDQASLPGHCREPPPWENEATERIYHFVVGQMVYYQCVQGYRALHRGPAESVCKMTHGKTRWTQPQLICTGE

SEQ ID NO: 40 - protein, 166 aa, Artificial Sequence
  Human IL-2Ralpha-sushi (22-187) with D6K_E29K_R36E alterations
ELCDDKPPEIPHATFKAMAYKEGTMLNCKCKRGFREIKSGSLYMLCTGNSSHSSWDNQCQCTSSATRNTTKQVTPQPEEQKERKTTEMQSPMQPVDQASLPGHCREPPPWENEATERIYHFVVGQMVYYQCVQGYRALHRGPAESVCKMTHGKTRWTQPQLICTGE

SEQ ID NO: 41 - protein, 166 aa, Artificial Sequence
  Human IL-2Ralpha-sushi (22-187) with D6K_R36E_K38E  alterations
ELCDDKPPEIPHATFKAMAYKEGTMLNCECKRGFREIESGSLYMLCTGNSSHSSWDNQCQCTSSATRNTTKQVTPQPEEQKERKTTEMQSPMQPVDQASLPGHCREPPPWENEATERIYHFVVGQMVYYQCVQGYRALHRGPAESVCKMTHGKTRWTQPQLICTGE

SEQ ID NO: 42 - protein, 166 aa, Artificial Sequence
  Human IL-2Ralpha-sushi (22-187) with D6K_E29K_R36E_K38E alterations
ELCDDKPPEIPHATFKAMAYKEGTMLNCKCKRGFREIESGSLYMLCTGNSSHSSWDNQCQCTSSATRNTTKQVTPQPEEQKERKTTEMQSPMQPVDQASLPGHCREPPPWENEATERIYHFVVGQMVYYQCVQGYRALHRGPAESVCKMTHGKTRWTQPQLICTGE

SEQ ID NO: 43 - protein, 166 aa, Artificial Sequence; identical to SEQ ID NO: 40
  Human IL-2Ralpha-sushi (22-187) with D6K_E29K_R36E alterations

SEQ ID NO: 44 - protein, 166 aa, Artificial Sequence; identical to SEQ ID NO: 41
  Human IL-2Ralpha-sushi (22-187) with D6K_R36E_K38E alterations

SEQ ID NO: 45 - protein, 166 aa, Artificial Sequence; identical to SEQ ID NO: 42
  Human IL-2Ralpha-sushi (22-187) with D6K_E29K_R36E_K38E alterations

SEQ ID NO: 46 - protein, 166 aa, Artificial Sequence
  Human IL-2Ralpha-sushi (22-187) with D6K alteration
ELCDDKPPEIPHATFKAMAYKEGTMLNCECKRGFRRIKSGSLYMLCTGNSSHSSWDNQCQCTSSATRNTTKQVTPQPEEQKERKTTEMQSPMQPVDQASLPGHCREPPPWENEATERIYHFVVGQMVYYQCVQGYRALHRGPAESVCKMTHGKTRWTQPQLICTGE

SEQ ID NO: 47 - protein, 166 aa, Artificial Sequence
  Human IL-2Ralpha-sushi (22-187) with D6R alteration
ELCDDRPPEIPHATFKAMAYKEGTMLNCECKRGFRRIKSGSLYMLCTGNSSHSSWDNQCQCTSSATRNTTKQVTPQPEEQKERKTTEMQSPMQPVDQASLPGHCREPPPWENEATERIYHFVVGQMVYYQCVQGYRALHRGPAESVCKMTHGKTRWTQPQLICTGE

SEQ ID NO: 48 - protein, 166 aa, Artificial Sequence
  Human IL-2Ralpha-sushi (22-187) with E29K alteration
ELCDDDPPEIPHATFKAMAYKEGTMLNCKCKRGFRRIKSGSLYMLCTGNSSHSSWDNQCQCTSSATRNTTKQVTPQPEEQKERKTTEMQSPMQPVDQASLPGHCREPPPWENEATERIYHFVVGQMVYYQCVQGYRALHRGPAESVCKMTHGKTRWTQPQLICTGE

SEQ ID NO: 49 - protein, 166 aa, Artificial Sequence
  Human IL-2Ralpha-sushi (22-187) with K38E alteration
ELCDDDPPEIPHATFKAMAYKEGTMLNCECKRGFRRIESGSLYMLCTGNSSHSSWDNQCQCTSSATRNTTKQVTPQPEEQKERKTTEMQSPMQPVDQASLPGHCREPPPWENEATERIYHFVVGQMVYYQCVQGYRALHRGPAESVCKMTHGKTRWTQPQLICTGE

SEQ ID NO: 50 - protein, 166 aa, Artificial Sequence
  Human IL-2Ralpha-sushi (22-187) with K38D alteration
ELCDDDPPEIPHATFKAMAYKEGTMLNCECKRGFRRIDSGSLYMLCTGNSSHSSWDNQCQCTSSATRNTTKQVTPQPEEQKERKTTEMQSPMQPVDQASLPGHCREPPPWENEATERIYHFVVGQMVYYQCVQGYRALHRGPAESVCKMTHGKTRWTQPQLICTGE

SEQ ID NO: 51 - protein, 166 aa, Artificial Sequence
  Human IL-2Ralpha-sushi (22-187) with R36E alteration
ELCDDDPPEIPHATFKAMAYKEGTMLNCECKRGFREIKSGSLYMLCTGNSSHSSWDNQCQCTSSATRNTTKQVTPQPEEQKERKTTEMQSPMQPVDQASLPGHCREPPPWENEATERIYHFVVGQMVYYQCVQGYRALHRGPAESVCKMTHGKTRWTQPQLICTGE

SEQ ID NO: 52 - protein, 166 aa, Artificial Sequence
  Human IL-2Ralpha-sushi (22-187) with R36D alteration
ELCDDDPPEIPHATFKAMAYKEGTMLNCECKRGFRDIKSGSLYMLCTGNSSHSSWDNQCQCTSSATRNTTKQVTPQPEEQKERKTTEMQSPMQPVDQASLPGHCREPPPWENEATERIYHFVVGQMVYYQCVQGYRALHRGPAESVCKMTHGKTRWTQPQLICTGE

SEQ ID NO: 53 - protein, 166 aa, Artificial Sequence
  Human IL-2Ralpha-sushi (22-187) with D6R_E29K alterations
ELCDDRPPEIPHATFKAMAYKEGTMLNCKCKRGFRRIKSGSLYMLCTGNSSHSSWDNQCQCTSSATRNTTKQVTPQPEEQKERKTTEMQSPMQPVDQASLPGHCREPPPWENEATERIYHFVVGQMVYYQCVQGYRALHRGPAESVCKMTHGKTRWTQPQLICTGE

SEQ ID NO: 54 - protein, 166 aa, Artificial Sequence
  Human IL-2Ralpha-sushi (22-187) with E29K_K38E alterations
ELCDDDPPEIPHATFKAMAYKEGTMLNCKCKRGFRRIESGSLYMLCTGNSSHSSWDNQCQCTSSATRNTTKQVTPQPEEQKERKTTEMQSPMQPVDQASLPGHCREPPPWENEATERIYHFVVGQMVYYQCVQGYRALHRGPAESVCKMTHGKTRWTQPQLICTGE

SEQ ID NO: 55 - protein, 166 aa, Artificial Sequence
  Human IL-2Ralpha-sushi (22-187) with D6R_E29K_K38E alterations
ELCDDRPPEIPHATFKAMAYKEGTMLNCKCKRGFRRIESGSLYMLCTGNSSHSSWDNQCQCTSSATRNTTKQVTPQPEEQKERKTTEMQSPMQPVDQASLPGHCREPPPWENEATERIYHFVVGQMVYYQCVQGYRALHRGPAESVCKMTHGKTRWTQPQLICTGE

SEQ ID NO: 56 - protein, 12 aa, Artificial Sequence
  Made in Lab - cleavable peptide linker
GSLSGRSDNHGS

SEQ ID NO: 57 - protein, 10 aa, Artificial Sequence
  Made in Lab - cleavable peptide linker
LGGSGRSANA

SEQ ID NO: 58 - protein, 9 aa, Artificial Sequence
  Made in Lab - cleavable peptide linker
LSGRSANAG

SEQ ID NO: 59 - protein, 12 aa, Artificial Sequence
  Made in Lab - cleavable peptide linker
GPLGLAGRSANA

SEQ ID NO: 60 - protein, 14 aa, Artificial Sequence
  Made in Lab - cleavable peptide linker
PLGLSGRSANAGPA

SEQ ID NO: 61 - protein, 14 aa, Artificial Sequence
  Made in Lab - cleavable peptide linker
PLGLAGRSANAGPA

SEQ ID NO: 62 - protein, 17 aa, Artificial Sequence
  Made in Lab - cleavable peptide linker
GPLGLSGRSANAGPASG

SEQ ID NO: 63 - protein, 17 aa, Artificial Sequence
  Made in Lab - cleavable peptide linker
GPLGLAGRSANAGPASG

SEQ ID NO: 64 - protein, 17 aa, Artificial Sequence
  Made in Lab - cleavable peptide linker
SGPLGLAGRSANAGPAS

SEQ ID NO: 65 - protein, 17 aa, Artificial Sequence
  Made in Lab - cleavable peptide linker
SGPASGRSANAPLGLAG

SEQ ID NO: 66 - protein, 17 aa, Artificial Sequence
  Made in Lab - cleavable peptide linker
GPASGRSANAPLGLAGS

SEQ ID NO: 67 - protein, 17 aa, Artificial Sequence
  Made in Lab - cleavable peptide linker
GPLGLAGRSANPGPASG

SEQ ID NO: 68 - protein, 17 aa, Artificial Sequence
  Made in Lab - cleavable peptide linker
GPLGLAGRSDNHGPASG

SEQ ID NO: 69 - protein, 17 aa, Artificial Sequence
  Made in Lab - cleavable peptide linker
GPLGLAGRSDNPGPASG

SEQ ID NO: 70 - protein, 17 aa, Artificial Sequence
  Made in Lab - cleavable peptide linker
GPLGLAGRSENPGPASG

SEQ ID NO: 71 - protein, 17 aa, Artificial Sequence
  Made in Lab - cleavable peptide linker
GPLGLAGRSDNLGPASG

SEQ ID NO: 72 - protein, 17 aa, Artificial Sequence
  Made in Lab - cleavable peptide linker
GPLGLAGRNAQVGPASG

SEQ ID NO: 73 - protein, 8 aa, Artificial Sequence
  Made in Lab - cleavable peptide linker
LSGRSDNA

SEQ ID NO: 74 - protein, 8 aa, Artificial Sequence
  Made in Lab - cleavable peptide linker
LSGRSDND

SEQ ID NO: 75 - protein, 8 aa, Artificial Sequence
  Made in Lab - cleavable peptide linker
LSGRSDNE

SEQ ID NO: 76 - protein, 8 aa, Artificial Sequence
  Made in Lab - cleavable peptide linker
LSGRSDNF

SEQ ID NO: 77 - protein, 8 aa, Artificial Sequence
  Made in Lab - cleavable peptide linker
LSGRSDNG

SEQ ID NO: 78 - protein, 8 aa, Artificial Sequence
  Made in Lab - cleavable peptide linker
LSGRSDNI

SEQ ID NO: 79 - protein, 8 aa, Artificial Sequence
  Made in Lab - cleavable peptide linker
LSGRSDNK

SEQ ID NO: 80 - protein, 8 aa, Artificial Sequence
  Made in Lab - cleavable peptide linker
LSGRSDNL

SEQ ID NO: 81 - protein, 8 aa, Artificial Sequence
  Made in Lab - cleavable peptide linker
LSGRSDNM

SEQ ID NO: 82 - protein, 8 aa, Artificial Sequence
  Made in Lab - cleavable peptide linker
LSGRSDNN

SEQ ID NO: 83 - protein, 8 aa, Artificial Sequence
  Made in Lab - cleavable peptide linker
LSGRSDNP

SEQ ID NO: 84 - protein, 8 aa, Artificial Sequence
  Made in Lab - cleavable peptide linker
LSGRSDNQ

SEQ ID NO: 85 - protein, 8 aa, Artificial Sequence
  Made in Lab - cleavable peptide linker
LSGRSDNR

SEQ ID NO: 86 - protein, 8 aa, Artificial Sequence
  Made in Lab - cleavable peptide linker
LSGRSDNS

SEQ ID NO: 87 - protein, 8 aa, Artificial Sequence
  Made in Lab - cleavable peptide linker
LSGRSDNT

SEQ ID NO: 88 - protein, 8 aa, Artificial Sequence
  Made in Lab - cleavable peptide linker
LSGRSDNV

SEQ ID NO: 89 - protein, 8 aa, Artificial Sequence
  Made in Lab - cleavable peptide linker
LSGRSDNW

SEQ ID NO: 90 - protein, 8 aa, Artificial Sequence
  Made in Lab - cleavable peptide linker
LSGRSDNY

SEQ ID NO: 91 - protein, 8 aa, Artificial Sequence
  Made in Lab - cleavable peptide linker
LSGRSAND

SEQ ID NO: 92 - protein, 8 aa, Artificial Sequence
  Made in Lab - cleavable peptide linker
LSGRSANE

SEQ ID NO: 93 - protein, 8 aa, Artificial Sequence
  Made in Lab - cleavable peptide linker
LSGRSANF

SEQ ID NO: 94 - protein, 8 aa, Artificial Sequence
  Made in Lab - cleavable peptide linker
LSGRSANG

SEQ ID NO: 95 - protein, 8 aa, Artificial Sequence
  Made in Lab - cleavable peptide linker
LSGRSANH

SEQ ID NO: 96 - protein, 8 aa, Artificial Sequence
  Made in Lab - cleavable peptide linker
LSGRSANI

SEQ ID NO: 97 - protein, 8 aa, Artificial Sequence
  Made in Lab - cleavable peptide linker
LSGRSANK

SEQ ID NO: 98 - protein, 8 aa, Artificial Sequence
  Made in Lab - cleavable peptide linker
LSGRSANL

SEQ ID NO: 99 - protein, 8 aa, Artificial Sequence
  Made in Lab - cleavable peptide linker
LSGRSANM

SEQ ID NO: 100 - protein, 8 aa, Artificial Sequence
  Made in Lab - cleavable peptide linker
LSGRSANN

SEQ ID NO: 101 - protein, 8 aa, Artificial Sequence
  Made in Lab - cleavable peptide linker
LSGRSANP

SEQ ID NO: 102 - protein, 8 aa, Artificial Sequence
  Made in Lab - cleavable peptide linker
LSGRSANQ

SEQ ID NO: 103 - protein, 8 aa, Artificial Sequence
  Made in Lab - cleavable peptide linker
LSGRSANR

SEQ ID NO: 104 - protein, 8 aa, Artificial Sequence
  Made in Lab - cleavable peptide linker
LSGRSANS

SEQ ID NO: 105 - protein, 8 aa, Artificial Sequence
  Made in Lab - cleavable peptide linker
LSGRSANT

SEQ ID NO: 106 - protein, 8 aa, Artificial Sequence
  Made in Lab - cleavable peptide linker
LSGRSANV

SEQ ID NO: 107 - protein, 8 aa, Artificial Sequence
  Made in Lab - cleavable peptide linker
LSGRSANW

SEQ ID NO: 108 - protein, 8 aa, Artificial Sequence
  Made in Lab - cleavable peptide linker
LSGRSANY

SEQ ID NO: 109 - protein, 12 aa, Artificial Sequence
  Made in Lab - cleavable peptide linker
PLGLAGRSDNHS

SEQ ID NO: 110 - protein, 13 aa, Artificial Sequence
  Made in Lab - cleavable peptide linker
PLGLAGSGRSDNR

SEQ ID NO: 111 - protein, 15 aa, Artificial Sequence
  Made in Lab - cleavable peptide linker
PLGLAGSGRSDNRGA

SEQ ID NO: 112 - protein, 15 aa, Artificial Sequence
  Made in Lab - cleavable peptide linker
PLGLAGSGRSDNQGA

SEQ ID NO: 113 - protein, 15 aa, Artificial Sequence
  Made in Lab - cleavable peptide linker
PLGLAGSGRSDNYGA

SEQ ID NO: 114 - protein, 15 aa, Artificial Sequence
  Made in Lab - cleavable peptide linker
GPLGLAGSGRSDNQG

SEQ ID NO: 115 - protein, 4 aa, Artificial Sequence
  Made in Lab - cleavable peptide linker
GRGD

SEQ ID NO: 116 - protein, 5 aa, Artificial Sequence
  Made in Lab - cleavable peptide linker
GRGDN

SEQ ID NO: 117 - protein, 5 aa, Artificial Sequence
  Made in Lab - cleavable peptide linker
GRGDS

SEQ ID NO: 118 - protein, 7 aa, Artificial Sequence
  Made in Lab - cleavable peptide linker
GRGDSPK

SEQ ID NO: 119 - protein, 4 aa, Artificial Sequence
  Made in Lab - cleavable peptide linker
AAPV

SEQ ID NO: 120 - protein, 4 aa, Artificial Sequence
  Made in Lab - cleavable peptide linker
AAPL

SEQ ID NO: 121 - protein, 4 aa, Artificial Sequence
  Made in Lab - cleavable peptide linker
AAPF

SEQ ID NO: 122 - protein, 4 aa, Artificial Sequence
  Made in Lab - cleavable peptide linker
AAPA

SEQ ID NO: 123 - protein, 4 aa, Artificial Sequence
  Made in Lab - cleavable peptide linker
AYLV

SEQ ID NO: 124 - protein, 6 aa, Artificial Sequence
  Made in Lab - cleavable peptide linker
  MOD_RES (3)..(3): X = Any amino acid
  MOD_RES (6)..(6): X = Any amino acid
GPXGPX

SEQ ID NO: 125 - protein, 4 aa, Artificial Sequence
  Made in Lab - cleavable peptide linker
  MOD_RES (4)..(4): X = Any amino acid
LGPX

SEQ ID NO: 126 - protein, 6 aa, Artificial Sequence
  Made in Lab - cleavable peptide linker
  MOD_RES (6)..(6): X = Any amino acid
GPIGPX

SEQ ID NO: 127 - protein, 5 aa, Artificial Sequence
  Made in Lab - cleavable peptide linker
  MOD_RES (5)..(5): X = Any amino acid
APGLX

SEQ ID NO: 128 - protein, 7 aa, Artificial Sequence
  Made in Lab - cleavable peptide linker
  MOD_RES (7)..(7): X = Any amino acid
PLGPDRX

SEQ ID NO: 129 - protein, 7 aa, Artificial Sequence
  Made in Lab - cleavable peptide linker
  MOD_RES (7)..(7): X = Any amino acid
PLGLLGX

SEQ ID NO: 130 - protein, 7 aa, Artificial Sequence
  Made in Lab - cleavable peptide linker
PQGIAGW

SEQ ID NO: 131 - protein, 5 aa, Artificial Sequence
  Made in Lab - cleavable peptide linker
PLGCH

SEQ ID NO: 132 - protein, 6 aa, Artificial Sequence
  Made in Lab - cleavable peptide linker
PLGLYA

SEQ ID NO: 133 - protein, 7 aa, Artificial Sequence
  Made in Lab - cleavable peptide linker
PLALWAR

SEQ ID NO: 134 - protein, 7 aa, Artificial Sequence
  Made in Lab - cleavable peptide linker
PLAYWAR

SEQ ID NO: 135 - protein, 7 aa, Artificial Sequence
  Made in Lab - cleavable peptide linker
PYAYYMR

SEQ ID NO: 136 - protein, 7 aa, Artificial Sequence
  Made in Lab - cleavable peptide linker
PLGMYSR

SEQ ID NO: 137 - protein, 4 aa, Artificial Sequence
  Made in Lab - cleavable peptide linker
GDKP

SEQ ID NO: 138 - protein, 5 aa, Artificial Sequence
  Made in Lab - cleavable peptide linker
GSDKP

SEQ ID NO: 139 - protein, 4 aa, Artificial Sequence
  Made in Lab - cleavable peptide linker
VLAL

SEQ ID NO: 140 - protein, 4 aa, Artificial Sequence
  Made in Lab - cleavable peptide linker
GFLG

SEQ ID NO: 141 - protein, 4 aa, Artificial Sequence
  Made in Lab - non-cleavable peptide linker
GSGS

SEQ ID NO: 142 - protein, 4 aa, Artificial Sequence
  Made in Lab - non-cleavable peptide linker
GGSG

SEQ ID NO: 143 - protein, 4 aa, Artificial Sequence
  Made in Lab - non-cleavable peptide linker
GGGS

SEQ ID NO: 144 - protein, 5 aa, Artificial Sequence
  Made in Lab - non-cleavable peptide linker
GGGGS

SEQ ID NO: 145 - protein, 4 aa, Artificial Sequence
  Made in Lab - non-cleavable peptide linker
GNGN

SEQ ID NO: 146 - protein, 4 aa, Artificial Sequence
  Made in Lab - non-cleavable peptide linker
GGNG

SEQ ID NO: 147 - protein, 4 aa, Artificial Sequence
  Made in Lab - non-cleavable peptide linker
GGGN

SEQ ID NO: 148 - protein, 5 aa, Artificial Sequence
  Made in Lab - non-cleavable peptide linker
GGGGN

SEQ ID NO: 149 - protein, 15 aa, Artificial Sequence
  Made in Lab - non-cleavable peptide linker
GGGGSGGGGSGGGGS

SEQ ID NO: 150 - protein, 22 aa, Artificial Sequence
  Made in Lab - non-cleavable peptide linker
GSGGGGSGGGGSGGGGSGGGGS

SEQ ID NO: 151 - protein, 30 aa, Artificial Sequence
  Made in Lab - non-cleavable peptide linker
GGGGSGGGGSGGGGSGGGGSGGGGSGGGGS

SEQ ID NO: 152 - protein, 25 aa, Artificial Sequence
  Made in Lab - non-cleavable peptide linker
DAAAKEAAAKDAAAREAAARDAAAK

SEQ ID NO: 153 - protein, 14 aa, Artificial Sequence
  Made in Lab - non-cleavable peptide linker
NVDHKPSNTKVDKR

SEQ ID NO: 154 - protein, 5 aa, Artificial Sequence
  Made in Lab - non-cleavable peptide linker
DGGGS

SEQ ID NO: 155 - protein, 5 aa, Artificial Sequence
  Made in Lab - non-cleavable peptide linker
TGEKP

SEQ ID NO: 156 - protein, 4 aa, Artificial Sequence
  Made in Lab - non-cleavable peptide linker
GGRR

SEQ ID NO: 157 - protein, 14 aa, Artificial Sequence
  Made in Lab - non-cleavable peptide linker
EGKSSGSGSESKVD

SEQ ID NO: 158 - protein, 18 aa, Artificial Sequence
  Made in Lab - non-cleavable peptide linker
KESGSVSSEQLAQFRSLD

SEQ ID NO: 159 - protein, 8 aa, Artificial Sequence
  Made in Lab - non-cleavable peptide linker
GGRRGGGS

SEQ ID NO: 160 - protein, 9 aa, Artificial Sequence
  Made in Lab - non-cleavable peptide linker
LRQRDGERP

SEQ ID NO: 161 - protein, 12 aa, Artificial Sequence
  Made in Lab - non-cleavable peptide linker
LRQKDGGGSERP

SEQ ID NO: 162 - protein, 13 aa, Artificial Sequence
  Made in Lab - non-cleavable peptide linker
LRQKDGGGSGGGS

SEQ ID NO: 163 - protein, 11 aa, Artificial Sequence
  Mad in Lab - affinity purification peptide tag
YTDIEMNRLGK

SEQ ID NO: 164 - protein, 6 aa, Artificial Sequence
  Mad in Lab - affinity purification peptide tag
HTTPHH

SEQ ID NO: 165 - protein, 8 aa, Artificial Sequence
  Mad in Lab - affinity purification peptide tag
WSHPQFEK

SEQ ID NO: 166 - protein, 9 aa, Artificial Sequence
  Mad in Lab - affinity purification peptide tag
AWAHPQPGG

SEQ ID NO: 167 - protein, 15 aa, Artificial Sequence
  Mad in Lab - affinity purification peptide tag
KETAAAKFERQHMDS

SEQ ID NO: 168 - protein, 9 aa, Artificial Sequence
  Mad in Lab - affinity purification peptide tag
NANNPDWDF

SEQ ID NO: 169 - protein, 11 aa, Artificial Sequence
  Mad in Lab - affinity purification peptide tag
CEQKLISEEDL

SEQ ID NO: 170 - protein, 11 aa, Artificial Sequence
  Mad in Lab - affinity purification peptide tag
KPPTPPPEPET

SEQ ID NO: 171 - protein, 8 aa, Artificial Sequence
  Mad in Lab - affinity purification peptide tag
QPELAPED

SEQ ID NO: 172 - protein, 19 aa, Artificial Sequence
  Mad in Lab - affinity purification peptide tag
KDHLIHNVHKEFHAHAHNK

SEQ ID NO: 173 - protein, 7 aa, Artificial Sequence
  Mad in Lab - affinity purification peptide tag
DYKDDDK

SEQ ID NO: 174 - protein, 10 aa, Artificial Sequence
  Mad in Lab - affinity purification peptide tag
SSTSSDFRDR

SEQ ID NO: 175 - protein, 14 aa, Artificial Sequence
  Mad in Lab - affinity purification peptide tag
GKPIPNPLLGLDST

SEQ ID NO: 176 - protein, 11 aa, Artificial Sequence
  Mad in Lab - affinity purification peptide tag
MASMTGGQQMG

SEQ ID NO: 177 - protein, 6 aa, Artificial Sequence
  Mad in Lab - affinity purification peptide tag
TDFYLK

SEQ ID NO: 178 - protein, 6 aa, Artificial Sequence
  Mad in Lab - affinity purification peptide tag
DTYRYI

SEQ ID NO: 179 - protein, 13 aa, Artificial Sequence
  Made in Lab - cleavable peptide linker
PLGLAGSGRSDNQ

SEQ ID NO: 180 - protein, 13 aa, Artificial Sequence
  Made in Lab - cleavable peptide linker
PLGLAGSGRSDNR

SEQ ID NO: 181 - protein, 13 aa, Artificial Sequence
  Made in Lab - cleavable peptide linker
PLGLAGSGRSDNH

SEQ ID NO: 182 - protein, 13 aa, Artificial Sequence
  Made in Lab - cleavable peptide linker
PLGLAGSGRSDNT

SEQ ID NO: 183 - protein, 7 aa, Artificial Sequence
  Made in Lab - cleavable peptide linker
SGRSDNH

SEQ ID NO: 184 - protein, 375 aa, Artificial Sequence
  Fusion Construct - Fc-stableLinker-IL-2_T3A
EPKSSDKTHTCPPCPAPELLGGPSVFLFPPKPKDTLMISRTPEVTCVVVDVSHEDPEVKFNWYVDGVEVHNAKTKPREEQYNSTYRVVSVLTVLHQDWLNGKEYKCKVSNKALPAPIEKTISKAKGQPREPQVYTLPPSREEMTKNQVSLTCLVKGFYPSDIAVEWESNGQPENNYKTTPPVLDSDGSFFLYSKLTVDKSRWQQGNVFSCSVMHEALHNHYTQKSLSLSPGKGGGGSGGGGSAPASSSTKKTQLQLEHLLLDLQMILNGINNYKNPKLTRMLTFKFYMPKKATELKHLQCLEEELKPLEEVLNLAQSKNFHLRPRDLISNINVIVLELKGSETTFMCEYADETATIVEFLNRWITFSQSIISTLT

SEQ ID NO: 185 - protein, 375 aa, Artificial Sequence
  Fusion Construct - Fc-stableLinker-IL-2_R38E_T3A
EPKSSDKTHTCPPCPAPELLGGPSVFLFPPKPKDTLMISRTPEVTCVVVDVSHEDPEVKFNWYVDGVEVHNAKTKPREEQYNSTYRVVSVLTVLHQDWLNGKEYKCKVSNKALPAPIEKTISKAKGQPREPQVYTLPPSREEMTKNQVSLTCLVKGFYPSDIAVEWESNGQPENNYKTTPPVLDSDGSFFLYSKLTVDKSRWQQGNVFSCSVMHEALHNHYTQKSLSLSPGKGGGGSGGGGSAPASSSTKKTQLQLEHLLLDLQMILNGINNYKNPKLTEMLTFKFYMPKKATELKHLQCLEEELKPLEEVLNLAQSKNFHLRPRDLISNINVIVLELKGSETTFMCEYADETATIVEFLNRWITFSQSIISTLT

SEQ ID NO: 186 - protein, 375 aa, Artificial Sequence
  Fusion Construct - Fc-stableLinker-IL-2_E61K_T3A
EPKSSDKTHTCPPCPAPELLGGPSVFLFPPKPKDTLMISRTPEVTCVVVDVSHEDPEVKFNWYVDGVEVHNAKTKPREEQYNSTYRVVSVLTVLHQDWLNGKEYKCKVSNKALPAPIEKTISKAKGQPREPQVYTLPPSREEMTKNQVSLTCLVKGFYPSDIAVEWESNGQPENNYKTTPPVLDSDGSFFLYSKLTVDKSRWQQGNVFSCSVMHEALHNHYTQKSLSLSPGKGGGGSGGGGSAPASSSTKKTQLQLEHLLLDLQMILNGINNYKNPKLTRMLTFKFYMPKKATELKHLQCLEKELKPLEEVLNLAQSKNFHLRPRDLISNINVIVLELKGSETTFMCEYADETATIVEFLNRWITFSQSIISTLT

SEQ ID NO: 187 - protein, 375 aa, Artificial Sequence
  Fusion Construct - Fc-stableLinker-IL-2_E62K_T3A
EPKSSDKTHTCPPCPAPELLGGPSVFLFPPKPKDTLMISRTPEVTCVVVDVSHEDPEVKFNWYVDGVEVHNAKTKPREEQYNSTYRVVSVLTVLHQDWLNGKEYKCKVSNKALPAPIEKTISKAKGQPREPQVYTLPPSREEMTKNQVSLTCLVKGFYPSDIAVEWESNGQPENNYKTTPPVLDSDGSFFLYSKLTVDKSRWQQGNVFSCSVMHEALHNHYTQKSLSLSPGKGGGGSGGGGSAPASSSTKKTQLQLEHLLLDLQMILNGINNYKNPKLTRMLTFKFYMPKKATELKHLQCLEEKLKPLEEVLNLAQSKNFHLRPRDLISNINVIVLELKGSETTFMCEYADETATIVEFLNRWITFSQSIISTLT

SEQ ID NO: 188 - protein, 375 aa, Artificial Sequence
  Fusion Construct - Fc-stableLinker-IL-2_E61K_E62K_T3A
EPKSSDKTHTCPPCPAPELLGGPSVFLFPPKPKDTLMISRTPEVTCVVVDVSHEDPEVKFNWYVDGVEVHNAKTKPREEQYNSTYRVVSVLTVLHQDWLNGKEYKCKVSNKALPAPIEKTISKAKGQPREPQVYTLPPSREEMTKNQVSLTCLVKGFYPSDIAVEWESNGQPENNYKTTPPVLDSDGSFFLYSKLTVDKSRWQQGNVFSCSVMHEALHNHYTQKSLSLSPGKGGGGSGGGGSAPASSSTKKTQLQLEHLLLDLQMILNGINNYKNPKLTRMLTFKFYMPKKATELKHLQCLEKKLKPLEEVLNLAQSKNFHLRPRDLISNINVIVLELKGSETTFMCEYADETATIVEFLNRWITFSQSIISTLT

SEQ ID NO: 189 - protein, 375 aa, Artificial Sequence
  Fusion Construct - Fc-stableLinker-IL-2_R38E_E61K_E62K_T3A
EPKSSDKTHTCPPCPAPELLGGPSVFLFPPKPKDTLMISRTPEVTCVVVDVSHEDPEVKFNWYVDGVEVHNAKTKPREEQYNSTYRVVSVLTVLHQDWLNGKEYKCKVSNKALPAPIEKTISKAKGQPREPQVYTLPPSREEMTKNQVSLTCLVKGFYPSDIAVEWESNGQPENNYKTTPPVLDSDGSFFLYSKLTVDKSRWQQGNVFSCSVMHEALHNHYTQKSLSLSPGKGGGGSGGGGSAPASSSTKKTQLQLEHLLLDLQMILNGINNYKNPKLTEMLTFKFYMPKKATELKHLQCLEKKLKPLEEVLNLAQSKNFHLRPRDLISNINVIVLELKGSETTFMCEYADETATIVEFLNRWITFSQSIISTLT

SEQ ID NO: 190 - protein, 375 aa, Artificial Sequence
  Fusion Construct - Fc-stableLinker-IL-2_F42A_R38E_T3A
EPKSSDKTHTCPPCPAPELLGGPSVFLFPPKPKDTLMISRTPEVTCVVVDVSHEDPEVKFNWYVDGVEVHNAKTKPREEQYNSTYRVVSVLTVLHQDWLNGKEYKCKVSNKALPAPIEKTISKAKGQPREPQVYTLPPSREEMTKNQVSLTCLVKGFYPSDIAVEWESNGQPENNYKTTPPVLDSDGSFFLYSKLTVDKSRWQQGNVFSCSVMHEALHNHYTQKSLSLSPGKGGGGSGGGGSAPASSSTKKTQLQLEHLLLDLQMILNGINNYKNPKLTEMLTAKFYMPKKATELKHLQCLEEELKPLEEVLNLAQSKNFHLRPRDLISNINVIVLELKGSETTFMCEYADETATIVEFLNRWITFSQSIISTLT

SEQ ID NO: 191 - protein, 375 aa, Artificial Sequence
  Fusion Construct - Fc-stableLinker-IL-2_F42A_E61K_T3A
EPKSSDKTHTCPPCPAPELLGGPSVFLFPPKPKDTLMISRTPEVTCVVVDVSHEDPEVKFNWYVDGVEVHNAKTKPREEQYNSTYRVVSVLTVLHQDWLNGKEYKCKVSNKALPAPIEKTISKAKGQPREPQVYTLPPSREEMTKNQVSLTCLVKGFYPSDIAVEWESNGQPENNYKTTPPVLDSDGSFFLYSKLTVDKSRWQQGNVFSCSVMHEALHNHYTQKSLSLSPGKGGGGSGGGGSAPASSSTKKTQLQLEHLLLDLQMILNGINNYKNPKLTRMLTAKFYMPKKATELKHLQCLEKELKPLEEVLNLAQSKNFHLRPRDLISNINVIVLELKGSETTFMCEYADETATIVEFLNRWITFSQSIISTLT

SEQ ID NO: 192 - protein, 375 aa, Artificial Sequence
  Fusion Construct - Fc-stableLinker-IL-2_F42A_E62K_T3A
EPKSSDKTHTCPPCPAPELLGGPSVFLFPPKPKDTLMISRTPEVTCVVVDVSHEDPEVKFNWYVDGVEVHNAKTKPREEQYNSTYRVVSVLTVLHQDWLNGKEYKCKVSNKALPAPIEKTISKAKGQPREPQVYTLPPSREEMTKNQVSLTCLVKGFYPSDIAVEWESNGQPENNYKTTPPVLDSDGSFFLYSKLTVDKSRWQQGNVFSCSVMHEALHNHYTQKSLSLSPGKGGGGSGGGGSAPASSSTKKTQLQLEHLLLDLQMILNGINNYKNPKLTRMLTAKFYMPKKATELKHLQCLEEKLKPLEEVLNLAQSKNFHLRPRDLISNINVIVLELKGSETTFMCEYADETATIVEFLNRWITFSQSIISTLT

SEQ ID NO: 193 - protein, 375 aa, Artificial Sequence
  Fusion Construct - Fc-stableLinker-IL-2_F42A_E61K_E62K_T3A
EPKSSDKTHTCPPCPAPELLGGPSVFLFPPKPKDTLMISRTPEVTCVVVDVSHEDPEVKFNWYVDGVEVHNAKTKPREEQYNSTYRVVSVLTVLHQDWLNGKEYKCKVSNKALPAPIEKTISKAKGQPREPQVYTLPPSREEMTKNQVSLTCLVKGFYPSDIAVEWESNGQPENNYKTTPPVLDSDGSFFLYSKLTVDKSRWQQGNVFSCSVMHEALHNHYTQKSLSLSPGKGGGGSGGGGSAPASSSTKKTQLQLEHLLLDLQMILNGINNYKNPKLTRMLTAKFYMPKKATELKHLQCLEKKLKPLEEVLNLAQSKNFHLRPRDLISNINVIVLELKGSETTFMCEYADETATIVEFLNRWITFSQSIISTLT

SEQ ID NO: 194 - protein, 375 aa, Artificial Sequence
  Fusion Construct - Fc-stableLinker-IL-2_F42A_R38E_E61K_E62K_T3A
EPKSSDKTHTCPPCPAPELLGGPSVFLFPPKPKDTLMISRTPEVTCVVVDVSHEDPEVKFNWYVDGVEVHNAKTKPREEQYNSTYRVVSVLTVLHQDWLNGKEYKCKVSNKALPAPIEKTISKAKGQPREPQVYTLPPSREEMTKNQVSLTCLVKGFYPSDIAVEWESNGQPENNYKTTPPVLDSDGSFFLYSKLTVDKSRWQQGNVFSCSVMHEALHNHYTQKSLSLSPGKGGGGSGGGGSAPASSSTKKTQLQLEHLLLDLQMILNGINNYKNPKLTEMLTAKFYMPKKATELKHLQCLEKKLKPLEEVLNLAQSKNFHLRPRDLISNINVIVLELKGSETTFMCEYADETATIVEFLNRWITFSQSIISTLT

SEQ ID NO: 195 - protein, 375 aa, Artificial Sequence
  Fusion Construct - Fc_IL-2_R38D_T3A
EPKSSDKTHTCPPCPAPELLGGPSVFLFPPKPKDTLMISRTPEVTCVVVDVSHEDPEVKFNWYVDGVEVHNAKTKPREEQYNSTYRVVSVLTVLHQDWLNGKEYKCKVSNKALPAPIEKTISKAKGQPREPQVYTLPPSREEMTKNQVSLTCLVKGFYPSDIAVEWESNGQPENNYKTTPPVLDSDGSFFLYSKLTVDKSRWQQGNVFSCSVMHEALHNHYTQKSLSLSPGKGGGGSGGGGSAPASSSTKKTQLQLEHLLLDLQMILNGINNYKNPKLTDMLTFKFYMPKKATELKHLQCLEEELKPLEEVLNLAQSKNFHLRPRDLISNINVIVLELKGSETTFMCEYADETATIVEFLNRWITFSQSIISTLT

SEQ ID NO: 196 - protein, 375 aa, Artificial Sequence
  Fusion Construct - Fc_IL-2_K43E_T3A
EPKSSDKTHTCPPCPAPELLGGPSVFLFPPKPKDTLMISRTPEVTCVVVDVSHEDPEVKFNWYVDGVEVHNAKTKPREEQYNSTYRVVSVLTVLHQDWLNGKEYKCKVSNKALPAPIEKTISKAKGQPREPQVYTLPPSREEMTKNQVSLTCLVKGFYPSDIAVEWESNGQPENNYKTTPPVLDSDGSFFLYSKLTVDKSRWQQGNVFSCSVMHEALHNHYTQKSLSLSPGKGGGGSGGGGSAPASSSTKKTQLQLEHLLLDLQMILNGINNYKNPKLTRMLTFEFYMPKKATELKHLQCLEEELKPLEEVLNLAQSKNFHLRPRDLISNINVIVLELKGSETTFMCEYADETATIVEFLNRWITFSQSIISTLT

SEQ ID NO: 197 - protein, 375 aa, Artificial Sequence
  Fusion Construct - Fc_IL-2_E61R_T3A
EPKSSDKTHTCPPCPAPELLGGPSVFLFPPKPKDTLMISRTPEVTCVVVDVSHEDPEVKFNWYVDGVEVHNAKTKPREEQYNSTYRVVSVLTVLHQDWLNGKEYKCKVSNKALPAPIEKTISKAKGQPREPQVYTLPPSREEMTKNQVSLTCLVKGFYPSDIAVEWESNGQPENNYKTTPPVLDSDGSFFLYSKLTVDKSRWQQGNVFSCSVMHEALHNHYTQKSLSLSPGKGGGGSGGGGSAPASSSTKKTQLQLEHLLLDLQMILNGINNYKNPKLTRMLTFKFYMPKKATELKHLQCLERELKPLEEVLNLAQSKNFHLRPRDLISNINVIVLELKGSETTFMCEYADETATIVEFLNRWITFSQSIISTLT

SEQ ID NO: 198 - protein, 375 aa, Artificial Sequence
  Fusion Construct - Fc_IL-2_E62R_T3A
EPKSSDKTHTCPPCPAPELLGGPSVFLFPPKPKDTLMISRTPEVTCVVVDVSHEDPEVKFNWYVDGVEVHNAKTKPREEQYNSTYRVVSVLTVLHQDWLNGKEYKCKVSNKALPAPIEKTISKAKGQPREPQVYTLPPSREEMTKNQVSLTCLVKGFYPSDIAVEWESNGQPENNYKTTPPVLDSDGSFFLYSKLTVDKSRWQQGNVFSCSVMHEALHNHYTQKSLSLSPGKGGGGSGGGGSAPASSSTKKTQLQLEHLLLDLQMILNGINNYKNPKLTRMLTFKFYMPKKATELKHLQCLEERLKPLEEVLNLAQSKNFHLRPRDLISNINVIVLELKGSETTFMCEYADETATIVEFLNRWITFSQSIISTLT

SEQ ID NO: 199 - protein, 375 aa, Artificial Sequence
  Fusion Construct - Fc_IL-2_R38E_K43E_T3A
EPKSSDKTHTCPPCPAPELLGGPSVFLFPPKPKDTLMISRTPEVTCVVVDVSHEDPEVKFNWYVDGVEVHNAKTKPREEQYNSTYRVVSVLTVLHQDWLNGKEYKCKVSNKALPAPIEKTISKAKGQPREPQVYTLPPSREEMTKNQVSLTCLVKGFYPSDIAVEWESNGQPENNYKTTPPVLDSDGSFFLYSKLTVDKSRWQQGNVFSCSVMHEALHNHYTQKSLSLSPGKGGGGSGGGGSAPASSSTKKTQLQLEHLLLDLQMILNGINNYKNPKLTEMLTFEFYMPKKATELKHLQCLEEELKPLEEVLNLAQSKNFHLRPRDLISNINVIVLELKGSETTFMCEYADETATIVEFLNRWITFSQSIISTLT

SEQ ID NO: 200 - protein, 375 aa, Artificial Sequence
  Fusion Construct - Fc_IL-2_R38D_K43E_T3A
EPKSSDKTHTCPPCPAPELLGGPSVFLFPPKPKDTLMISRTPEVTCVVVDVSHEDPEVKFNWYVDGVEVHNAKTKPREEQYNSTYRVVSVLTVLHQDWLNGKEYKCKVSNKALPAPIEKTISKAKGQPREPQVYTLPPSREEMTKNQVSLTCLVKGFYPSDIAVEWESNGQPENNYKTTPPVLDSDGSFFLYSKLTVDKSRWQQGNVFSCSVMHEALHNHYTQKSLSLSPGKGGGGSGGGGSAPASSSTKKTQLQLEHLLLDLQMILNGINNYKNPKLTDMLTFEFYMPKKATELKHLQCLEEELKPLEEVLNLAQSKNFHLRPRDLISNINVIVLELKGSETTFMCEYADETATIVEFLNRWITFSQSIISTLT

SEQ ID NO: 201 - protein, 375 aa, Artificial Sequence
  Fusion Construct - Fc_IL-2_R38E_E61K_T3A
EPKSSDKTHTCPPCPAPELLGGPSVFLFPPKPKDTLMISRTPEVTCVVVDVSHEDPEVKFNWYVDGVEVHNAKTKPREEQYNSTYRVVSVLTVLHQDWLNGKEYKCKVSNKALPAPIEKTISKAKGQPREPQVYTLPPSREEMTKNQVSLTCLVKGFYPSDIAVEWESNGQPENNYKTTPPVLDSDGSFFLYSKLTVDKSRWQQGNVFSCSVMHEALHNHYTQKSLSLSPGKGGGGSGGGGSAPASSSTKKTQLQLEHLLLDLQMILNGINNYKNPKLTEMLTFKFYMPKKATELKHLQCLEKELKPLEEVLNLAQSKNFHLRPRDLISNINVIVLELKGSETTFMCEYADETATIVEFLNRWITFSQSIISTLT

SEQ ID NO: 202 - protein, 375 aa, Artificial Sequence
  Fusion Construct - Fc_IL-2_R38D_E61K_T3A
EPKSSDKTHTCPPCPAPELLGGPSVFLFPPKPKDTLMISRTPEVTCVVVDVSHEDPEVKFNWYVDGVEVHNAKTKPREEQYNSTYRVVSVLTVLHQDWLNGKEYKCKVSNKALPAPIEKTISKAKGQPREPQVYTLPPSREEMTKNQVSLTCLVKGFYPSDIAVEWESNGQPENNYKTTPPVLDSDGSFFLYSKLTVDKSRWQQGNVFSCSVMHEALHNHYTQKSLSLSPGKGGGGSGGGGSAPASSSTKKTQLQLEHLLLDLQMILNGINNYKNPKLTDMLTFKFYMPKKATELKHLQCLEKELKPLEEVLNLAQSKNFHLRPRDLISNINVIVLELKGSETTFMCEYADETATIVEFLNRWITFSQSIISTLT

SEQ ID NO: 203 - protein, 375 aa, Artificial Sequence
  Fusion Construct - Fc_IL-2_K43E_E61K_T3A
EPKSSDKTHTCPPCPAPELLGGPSVFLFPPKPKDTLMISRTPEVTCVVVDVSHEDPEVKFNWYVDGVEVHNAKTKPREEQYNSTYRVVSVLTVLHQDWLNGKEYKCKVSNKALPAPIEKTISKAKGQPREPQVYTLPPSREEMTKNQVSLTCLVKGFYPSDIAVEWESNGQPENNYKTTPPVLDSDGSFFLYSKLTVDKSRWQQGNVFSCSVMHEALHNHYTQKSLSLSPGKGGGGSGGGGSAPASSSTKKTQLQLEHLLLDLQMILNGINNYKNPKLTRMLTFEFYMPKKATELKHLQCLEKELKPLEEVLNLAQSKNFHLRPRDLISNINVIVLELKGSETTFMCEYADETATIVEFLNRWITFSQSIISTLT

SEQ ID NO: 204 - protein, 375 aa, Artificial Sequence
  Fusion Construct - Fc_IL-2_R38D_K43E_E61K_T3A
EPKSSDKTHTCPPCPAPELLGGPSVFLFPPKPKDTLMISRTPEVTCVVVDVSHEDPEVKFNWYVDGVEVHNAKTKPREEQYNSTYRVVSVLTVLHQDWLNGKEYKCKVSNKALPAPIEKTISKAKGQPREPQVYTLPPSREEMTKNQVSLTCLVKGFYPSDIAVEWESNGQPENNYKTTPPVLDSDGSFFLYSKLTVDKSRWQQGNVFSCSVMHEALHNHYTQKSLSLSPGKGGGGSGGGGSAPASSSTKKTQLQLEHLLLDLQMILNGINNYKNPKLTDMLTFEFYMPKKATELKHLQCLEKELKPLEEVLNLAQSKNFHLRPRDLISNINVIVLELKGSETTFMCEYADETATIVEFLNRWITFSQSIISTLT

SEQ ID NO: 205 - protein, 375 aa, Artificial Sequence
  Fusion Construct - Fc_IL-2_R38D_F42A_K43E_T3A
EPKSSDKTHTCPPCPAPELLGGPSVFLFPPKPKDTLMISRTPEVTCVVVDVSHEDPEVKFNWYVDGVEVHNAKTKPREEQYNSTYRVVSVLTVLHQDWLNGKEYKCKVSNKALPAPIEKTISKAKGQPREPQVYTLPPSREEMTKNQVSLTCLVKGFYPSDIAVEWESNGQPENNYKTTPPVLDSDGSFFLYSKLTVDKSRWQQGNVFSCSVMHEALHNHYTQKSLSLSPGKGGGGSGGGGSAPASSSTKKTQLQLEHLLLDLQMILNGINNYKNPKLTDMLTAEFYMPKKATELKHLQCLEEELKPLEEVLNLAQSKNFHLRPRDLISNINVIVLELKGSETTFMCEYADETATIVEFLNRWITFSQSIISTLT

SEQ ID NO: 206 - protein, 375 aa, Artificial Sequence
  Fusion Construct - Fc_IL-2_F42A_K43E_E61K_T3A
EPKSSDKTHTCPPCPAPELLGGPSVFLFPPKPKDTLMISRTPEVTCVVVDVSHEDPEVKFNWYVDGVEVHNAKTKPREEQYNSTYRVVSVLTVLHQDWLNGKEYKCKVSNKALPAPIEKTISKAKGQPREPQVYTLPPSREEMTKNQVSLTCLVKGFYPSDIAVEWESNGQPENNYKTTPPVLDSDGSFFLYSKLTVDKSRWQQGNVFSCSVMHEALHNHYTQKSLSLSPGKGGGGSGGGGSAPASSSTKKTQLQLEHLLLDLQMILNGINNYKNPKLTRMLTAEFYMPKKATELKHLQCLEKELKPLEEVLNLAQSKNFHLRPRDLISNINVIVLELKGSETTFMCEYADETATIVEFLNRWITFSQSIISTLT

SEQ ID NO: 207 - protein, 187 aa, Artificial Sequence
  Fusion construct - Fc-stableLinker-IL2Ra-GLNDIFEAQKIEWHE-His6
HHHHHHGLNDIFEAQKIEWHEELCDDDPPEIPHATFKAMAYKEGTMLNCECKRGFRRIKSGSLYMLCTGNSSHSSWDNQCQCTSSATRNTTKQVTPQPEEQKERKTTEMQSPMQPVDQASLPGHCREPPPWENEATERIYHFVVGQMVYYQCVQGYRALHRGPAESVCKMTHGKTRWTQPQLICTGE

SEQ ID NO: 208 - protein, 429 aa, Artificial Sequence
  Fusion construct - His6-GLNDIFEAQKIEWHE-IL2Ra-full-ECD
ELCDDDPPEIPHATFKAMAYKEGTMLNCECKRGFRRIKSGSLYMLCTGNSSHSSWDNQCQCTSSATRNTTKQVTPQPEEQKERKTTEMQSPMQPVDQASLPGHCREPPPWENEATERIYHFVVGQMVYYQCVQGYRALHRGPAESVCKMTHGKTRWTQPQLICTGEGGGGSGGGGSEPKSSDKTHTCPPCPAPELLGGPSVFLFPPKPKDTLMISRTPEVTCVVVDVSHEDPEVKFNWYVDGVEVHNAKTKPREEQYNSTYRVVSVLTVLHQDWLNGKEYKCKVSNKALPAPIEKTISKAKGQPREPQVYTLPPSREEMTKNQVSLTCLVKGFYPSDIAVEWESNGQPENNYKTTPPVLDSDGSFFLYSKLTVDKSRWQQGNVFSCSVMHEALHNHYTQKSLSLSPGKGLNDIFEAQKIEWHEHHHHHH

SEQ ID NO: 209 - protein, 238 aa, Artificial Sequence
  Fusion construct - His6-GLNDIFEAQKIEWHE-IL-2RA
HHHHHHGLNDIFEAQKIEWHEELCDDDPPEIPHATFKAMAYKEGTMLNCECKRGFRRIKSGSLYMLCTGNSSHSSWDNQCQCTSSATRNTTKQVTPQPEEQKERKTTEMQSPMQPVDQASLPGHCREPPPWENEATERIYHFVVGQMVYYQCVQGYRALHRGPAESVCKMTHGKTRWTQPQLICTGEMETSQFPGEEKPQASPEGRPESETSCLVTTTDFQIQTEMAATMETSIFTTE

SEQ ID NO: 210 - protein, 480 aa, Artificial Sequence
  Fusion construct - Fc-stableLinker-IL2Ra-full-ECD-GLNDIFEAQKIEWHE-His6
ELCDDDPPEIPHATFKAMAYKEGTMLNCECKRGFRRIKSGSLYMLCTGNSSHSSWDNQCQCTSSATRNTTKQVTPQPEEQKERKTTEMQSPMQPVDQASLPGHCREPPPWENEATERIYHFVVGQMVYYQCVQGYRALHRGPAESVCKMTHGKTRWTQPQLICTGEMETSQFPGEEKPQASPEGRPESETSCLVTTTDFQIQTEMAATMETSIFTTEGGGGSGGGGSEPKSSDKTHTCPPCPAPELLGGPSVFLFPPKPKDTLMISRTPEVTCVVVDVSHEDPEVKFNWYVDGVEVHNAKTKPREEQYNSTYRVVSVLTVLHQDWLNGKEYKCKVSNKALPAPIEKTISKAKGQPREPQVYTLPPSREEMTKNQVSLTCLVKGFYPSDIAVEWESNGQPENNYKTTPPVLDSDGSFFLYSKLTVDKSRWQQGNVFSCSVMHEALHNHYTQKSLSLSPGKGLNDIFEAQKIEWHEHHHHHH

SEQ ID NO: 211 - protein, 187 aa, Artificial Sequence
  Fusion construct - His6-GLNDIFEAQKIEWHE-IL-2RA_D6K
HHHHHHGLNDIFEAQKIEWHEELCDDKPPEIPHATFKAMAYKEGTMLNCECKRGFRRIKSGSLYMLCTGNSSHSSWDNQCQCTSSATRNTTKQVTPQPEEQKERKTTEMQSPMQPVDQASLPGHCREPPPWENEATERIYHFVVGQMVYYQCVQGYRALHRGPAESVCKMTHGKTRWTQPQLICTGE

SEQ ID NO: 212 - protein, 187 aa, Artificial Sequence
  Fusion construct - His6-GLNDIFEAQKIEWHE-IL-2RA_R36E
HHHHHHGLNDIFEAQKIEWHEELCDDDPPEIPHATFKAMAYKEGTMLNCECKRGFREIKSGSLYMLCTGNSSHSSWDNQCQCTSSATRNTTKQVTPQPEEQKERKTTEMQSPMQPVDQASLPGHCREPPPWENEATERIYHFVVGQMVYYQCVQGYRALHRGPAESVCKMTHGKTRWTQPQLICTGE

SEQ ID NO: 213 - protein, 187 aa, Artificial Sequence
  Fusion construct - His6-GLNDIFEAQKIEWHE-IL-2RA_K38E
HHHHHHGLNDIFEAQKIEWHEELCDDDPPEIPHATFKAMAYKEGTMLNCECKRGFRRIESGSLYMLCTGNSSHSSWDNQCQCTSSATRNTTKQVTPQPEEQKERKTTEMQSPMQPVDQASLPGHCREPPPWENEATERIYHFVVGQMVYYQCVQGYRALHRGPAESVCKMTHGKTRWTQPQLICTGE

SEQ ID NO: 214 - protein, 187 aa, Artificial Sequence
  Fusion construct - His6-GLNDIFEAQKIEWHE-IL-2RA_R36E_K38E
HHHHHHGLNDIFEAQKIEWHEELCDDDPPEIPHATFKAMAYKEGTMLNCECKRGFREIESGSLYMLCTGNSSHSSWDNQCQCTSSATRNTTKQVTPQPEEQKERKTTEMQSPMQPVDQASLPGHCREPPPWENEATERIYHFVVGQMVYYQCVQGYRALHRGPAESVCKMTHGKTRWTQPQLICTGE

SEQ ID NO: 215 - protein, 187 aa, Artificial Sequence
  Fusion construct - His6-GLNDIFEAQKIEWHE-IL-2RA_D6K_R36E_K38E
HHHHHHGLNDIFEAQKIEWHEELCDDKPPEIPHATFKAMAYKEGTMLNCECKRGFREIESGSLYMLCTGNSSHSSWDNQCQCTSSATRNTTKQVTPQPEEQKERKTTEMQSPMQPVDQASLPGHCREPPPWENEATERIYHFVVGQMVYYQCVQGYRALHRGPAESVCKMTHGKTRWTQPQLICTGE

SEQ ID NO: 216 - protein, 187 aa, Artificial Sequence
  Fusion construct - His6-avi-IL-2RA_D6R
HHHHHHGLNDIFEAQKIEWHEELCDDRPPEIPHATFKAMAYKEGTMLNCECKRGFRRIKSGSLYMLCTGNSSHSSWDNQCQCTSSATRNTTKQVTPQPEEQKERKTTEMQSPMQPVDQASLPGHCREPPPWENEATERIYHFVVGQMVYYQCVQGYRALHRGPAESVCKMTHGKTRWTQPQLICTGE

SEQ ID NO: 217 - protein, 187 aa, Artificial Sequence
  Fusion construct - His6-avi-IL-2RA_E29K
HHHHHHGLNDIFEAQKIEWHEELCDDRPPEIPHATFKAMAYKEGTMLNCKCKRGFRRIKSGSLYMLCTGNSSHSSWDNQCQCTSSATRNTTKQVTPQPEEQKERKTTEMQSPMQPVDQASLPGHCREPPPWENEATERIYHFVVGQMVYYQCVQGYRALHRGPAESVCKMTHGKTRWTQPQLICTGE

SEQ ID NO: 218 - protein, 187 aa, Artificial Sequence
  Fusion construct - His6-avi-IL-2RA_K38D
HHHHHHGLNDIFEAQKIEWHEELCDDDPPEIPHATFKAMAYKEGTMLNCECKRGFRRIDSGSLYMLCTGNSSHSSWDNQCQCTSSATRNTTKQVTPQPEEQKERKTTEMQSPMQPVDQASLPGHCREPPPWENEATERIYHFVVGQMVYYQCVQGYRALHRGPAESVCKMTHGKTRWTQPQLICTGE

SEQ ID NO: 219 - protein, 187 aa, Artificial Sequence; identical to SEQ ID NO: 212
  Fusion construct - His6-avi-IL-2RA_R36E

SEQ ID NO: 220 - protein, 187 aa, Artificial Sequence
  Fusion construct - His6-avi-IL-2RA_R36D
HHHHHHGLNDIFEAQKIEWHEELCDDDPPEIPHATFKAMAYKEGTMLNCECKRGFRDIKSGSLYMLCTGNSSHSSWDNQCQCTSSATRNTTKQVTPQPEEQKERKTTEMQSPMQPVDQASLPGHCREPPPWENEATERIYHFVVGQMVYYQCVQGYRALHRGPAESVCKMTHGKTRWTQPQLICTGE

SEQ ID NO: 221 - protein, 187 aa, Artificial Sequence
  Fusion construct - His6-avi-IL-2RA_D6K_E29K
HHHHHHGLNDIFEAQKIEWHEELCDDKPPEIPHATFKAMAYKEGTMLNCKCKRGFRRIKSGSLYMLCTGNSSHSSWDNQCQCTSSATRNTTKQVTPQPEEQKERKTTEMQSPMQPVDQASLPGHCREPPPWENEATERIYHFVVGQMVYYQCVQGYRALHRGPAESVCKMTHGKTRWTQPQLICTGE

SEQ ID NO: 222 - protein, 187 aa, Artificial Sequence; identical to SEQ ID NO: 217
  Fusion construct - His6-avi-IL-2RA_D6R_E29K

SEQ ID NO: 223 - protein, 187 aa, Artificial Sequence
  Fusion construct - His6-avi-IL-2RA_E29K_K38E
HHHHHHGLNDIFEAQKIEWHEELCDDDPPEIPHATFKAMAYKEGTMLNCKCKRGFRRIESGSLYMLCTGNSSHSSWDNQCQCTSSATRNTTKQVTPQPEEQKERKTTEMQSPMQPVDQASLPGHCREPPPWENEATERIYHFVVGQMVYYQCVQGYRALHRGPAESVCKMTHGKTRWTQPQLICTGE

SEQ ID NO: 224 - protein, 187 aa, Artificial Sequence
  Fusion construct - His6-avi-IL-2RA_D6R_E29K_K38E
HHHHHHGLNDIFEAQKIEWHEELCDDRPPEIPHATFKAMAYKEGTMLNCKCKRGFRRIESGSLYMLCTGNSSHSSWDNQCQCTSSATRNTTKQVTPQPEEQKERKTTEMQSPMQPVDQASLPGHCREPPPWENEATERIYHFVVGQMVYYQCVQGYRALHRGPAESVCKMTHGKTRWTQPQLICTGE

SEQ ID NO: 225 - protein, 309 aa, Artificial Sequence
  Fusion construct - IL-2(R38E_K43E)-GGSGGSGRSDNQGGA-IL-2RA(D6K_E29K)
STKKTQLQLEHLLLDLQMILNGINNYKNPKLTEMLTFEFYMPKKATELKHLQCLEEELKPLEEVLNLAQSKNFHLRPRDLISNINVIVLELKGSETTFMCEYADETATIVEFLNRWITFSQSIISTLTGGSGGSGRSDNQGGAELCDDKPPEIPHATFKAMAYKEGTMLNCKCKRGFRRIKSGSLYMLCTGNSSHSSWDNQCQCTSSATRNTTKQVTPQPEEQKERKTTEMQSPMQPVDQASLPGHCREPPPWENEATERIYHFVVGQMVYYQCVQGYRALHRGPAESVCKMTHGKTRWTQPQLICTGE

SEQ ID NO: 226 - protein, 309 aa, Artificial Sequence
  Fusion construct - IL-2(R38D_K43E)-GGSGGSGRSDNQGGA-IL-2RA(D6R_E29K
STKKTQLQLEHLLLDLQMILNGINNYKNPKLTDMLTFEFYMPKKATELKHLQCLEEELKPLEEVLNLAQSKNFHLRPRDLISNINVIVLELKGSETTFMCEYADETATIVEFLNRWITFSQSIISTLTGGSGGSGRSDNQGGAELCDDRPPEIPHATFKAMAYKEGTMLNCKCKRGFRRIKSGSLYMLCTGNSSHSSWDNQCQCTSSATRNTTKQVTPQPEEQKERKTTEMQSPMQPVDQASLPGHCREPPPWENEATERIYHFVVGQMVYYQCVQGYRALHRGPAESVCKMTHGKTRWTQPQLICTGE

SEQ ID NO: 227 - protein, 309 aa, Artificial Sequence
  Fusion construct - IL-2(R38E_E61K)-GGSGGSGRSDNQGGA-IL-2RA(D6K_K38E)
STKKTQLQLEHLLLDLQMILNGINNYKNPKLTEMLTFKFYMPKKATELKHLQCLEKELKPLEEVLNLAQSKNFHLRPRDLISNINVIVLELKGSETTFMCEYADETATIVEFLNRWITFSQSIISTLTGGSGGSGRSDNQGGAELCDDKPPEIPHATFKAMAYKEGTMLNCECKRGFRRIESGSLYMLCTGNSSHSSWDNQCQCTSSATRNTTKQVTPQPEEQKERKTTEMQSPMQPVDQASLPGHCREPPPWENEATERIYHFVVGQMVYYQCVQGYRALHRGPAESVCKMTHGKTRWTQPQLICTGE

SEQ ID NO: 228 - protein, 309 aa, Artificial Sequence
  Fusion construct - IL-2(R38E_K43E_E61K)-GGSGGSGRSDNQGGA-IL-2RA(D6K_E29K_K38E)
STKKTQLQLEHLLLDLQMILNGINNYKNPKLTEMLTFEFYMPKKATELKHLQCLEKELKPLEEVLNLAQSKNFHLRPRDLISNINVIVLELKGSETTFMCEYADETATIVEFLNRWITFSQSIISTLTGGSGGSGRSDNQGGAELCDDKPPEIPHATFKAMAYKEGTMLNCKCKRGFRRIESGSLYMLCTGNSSHSSWDNQCQCTSSATRNTTKQVTPQPEEQKERKTTEMQSPMQPVDQASLPGHCREPPPWENEATERIYHFVVGQMVYYQCVQGYRALHRGPAESVCKMTHGKTRWTQPQLICTGE

SEQ ID NO: 229 - protein, 772 aa, Artificial Sequence
  Fusion construct - activatable proprotein
EVQLVQSGAEVKKPGESLKISCKGSGYTFTENIIHWVRQMPGKGLEWIGWFHPGSGSIKYNEKFKDQVTISADKSISTAYLQWSSLKASDTAMYFCARHGGTGRGAMDYWGQGTLVTVSSASTKGPSVFPLAPSSKSTSGGTAALGCLVKDYFPEPVTVSWNSGALTSGVHTFPAVLQSSGLYSLSSVVTVPSSSLGTQTYICNVNHKPSNTKVDKKVEPKSCDKTHTCPPCPAPEAAGGPSVFLFPPKPKDTLMISRTPEVTCVVVDVSHEDPEVKFNWYVDGVEVHNAKTKPREEQYNSTYRVVSVLTVLHQDWLNGKEYKCKVSNKALAAPIEKTISKAKGQPREPQVYTLPPSRDELTKNQVSLTCLVKGFYPSDIAVEWESNGQPENNYKTTPPVLDSDGSFFLYSKLTVDKSRWQQGNVFSCSVMHEALHNHYTQKSLSLSPGGGSPLGLAGGGSGGSTKKTQLQLEHLLLDLQMILNGINNYKNPKLTEMLTFEFYMPKKATELKHLQCLEEELKPLEEVLNLAQSKNFHLRPRDLISNINVIVLELKGSETTFMCEYADETATIVEFLNRWITFSQSIISTLTGGSGGSGRSDNQGGAELCDDKPPEIPHATFKAMAYKEGTMLNCKCKRGFRRIKSGSLYMLCTGNSSHSSWDNQCQCTSSATRNTTKQVTPQPEEQKERKTTEMQSPMQPVDQASLPGHCREPPPWENEATERIYHFVVGQMVYYQCVQGYRALHRGPAESVCKMTHGKTRWTQPQLICTGE

SEQ ID NO: 230 - protein, 218 aa, Artificial Sequence
  Fusion construct - activatable proprotein
DIVMTQTPLSLSVTPGQPASISCRASKSVSTSAYSYMHWYLQKPGQSPQLLIYLASNLESGVPDRFSGSGSGTDFTLKISRVEAEDVGVYYCQHSRELPYTFGQGTKLEIKRTVAAPSVFIFPPSDEQLKSGTASVVCLLNNFYPREAKVQWKVDNALQSGNSQESVTEQDSKDSTYSLSSTLTLSKADYEKHKVYACEVTHQGLSSPVTKSFNRGEC

SEQ ID NO: 231 - protein, 218 aa, Artificial Sequence; identical to SEQ ID NO: 230
  Fusion construct - activatable proprotein

SEQ ID NO: 232 - protein, 455 aa, Artificial Sequence
  Fusion construct - activatable proprotein
EVQLVQSGAEVKKPGESLKISCKGSGYTFTENIIHWVRQMPGKGLEWIGWFHPGSGSIKYNEKFKDQVTISADKSISTAYLQWSSLKASDTAMYFCARHGGTGRGAMDYWGQGTLVTVSSASTKGPSVFPLAPSSKSTSGGTAALGCLVKDYFPEPVTVSWNSGALTSGVHTFPAVLQSSGLYSLSSVVTVPSSSLGTQTYICNVNHKPSNTKVDKKVEPKSCDKTHTCPPCPAPEAAGGPSVFLFPPKPKDTLMISRTPEVTCVVVDVSHEDPEVKFNWYVDGVEVHNAKTKPREEQYNSTYRVVSVLTVLHQDWLNGKEYKCKVSNKALAAPIEKTISKAKGQPREPQVYTLPPSRDELTKNQVSLTCLVKGFYPSDIAVEWESNGQPENNYKTTPPVLDSDGSFFLYSKLTVDKSRWQQGNVFSCSVMHEALHNHYTQKSLSLSPGGGSPLG

SEQ ID NO: 233 - protein, 317 aa, Artificial Sequence
  Fusion construct - activatable proprotein
LAGGGSGGSTKKTQLQLEHLLLDLQMILNGINNYKNPKLTEMLTFEFYMPKKATELKHLQCLEEELKPLEEVLNLAQSKNFHLRPRDLISNINVIVLELKGSETTFMCEYADETATIVEFLNRWITFSQSIISTLTGGSGGSGRSDNQGGAELCDDKPPEIPHATFKAMAYKEGTMLNCKCKRGFRRIKSGSLYMLCTGNSSHSSWDNQCQCTSSATRNTTKQVTPQPEEQKERKTTEMQSPMQPVDQASLPGHCREPPPWENEATERIYHFVVGQMVYYQCVQGYRALHRGPAESVCKMTHGKTRWTQPQLICTGE

SEQ ID NO: 234 - protein, 218 aa, Artificial Sequence; identical to SEQ ID NO: 230
  Fusion construct - activatable proprotein

SEQ ID NO: 235 - protein, 772 aa, Artificial Sequence; identical to SEQ ID NO: 229
  Fusion construct - activatable proprotein

SEQ ID NO: 236 - protein, 455 aa, Artificial Sequence; identical to SEQ ID NO: 232
  Fusion construct - activatable proprotein

SEQ ID NO: 237 - protein, 317 aa, Artificial Sequence; identical to SEQ ID NO: 233
  Fusion construct - activatable proprotein

SEQ ID NO: 238 - protein, 218 aa, Artificial Sequence; identical to SEQ ID NO: 230
  Fusion construct - activatable proprotein

SEQ ID NO: 239 - protein, 599 aa, Artificial Sequence
  Fusion construct - activatable proprotein
EVQLVQSGAEVKKPGESLKISCKGSGYTFTENIIHWVRQMPGKGLEWIGWFHPGSGSIKYNEKFKDQVTISADKSISTAYLQWSSLKASDTAMYFCARHGGTGRGAMDYWGQGTLVTVSSASTKGPSVFPLAPSSKSTSGGTAALGCLVKDYFPEPVTVSWNSGALTSGVHTFPAVLQSSGLYSLSSVVTVPSSSLGTQTYICNVNHKPSNTKVDKKVEPKSCDKTHTCPPCPAPEAAGGPSVFLFPPKPKDTLMISRTPEVTCVVVDVSHEDPEVKFNWYVDGVEVHNAKTKPREEQYNSTYRVVSVLTVLHQDWLNGKEYKCKVSNKALAAPIEKTISKAKGQPREPQVYTLPPSRDELTKNQVSLTCLVKGFYPSDIAVEWESNGQPENNYKTTPPVLDSDGSFFLYSKLTVDKSRWQQGNVFSCSVMHEALHNHYTQKSLSLSPGGGSPLGLAGGGSGGSTKKTQLQLEHLLLDLQMILNGINNYKNPKLTEMLTFEFYMPKKATELKHLQCLEEELKPLEEVLNLAQSKNFHLRPRDLISNINVIVLELKGSETTFMCEYADETATIVEFLNRWITFSQSIISTLTGGSGGSGR

SEQ ID NO: 240 - protein, 173 aa, Artificial Sequence
  Fusion construct - activatable proprotein
SDNQGGAELCDDKPPEIPHATFKAMAYKEGTMLNCKCKRGFRRIKSGSLYMLCTGNSSHSSWDNQCQCTSSATRNTTKQVTPQPEEQKERKTTEMQSPMQPVDQASLPGHCREPPPWENEATERIYHFVVGQMVYYQCVQGYRALHRGPAESVCKMTHGKTRWTQPQLICTGE

SEQ ID NO: 241 - protein, 218 aa, Artificial Sequence; identical to SEQ ID NO: 230
  Fusion construct - activatable proprotein

SEQ ID NO: 242 - protein, 772 aa, Artificial Sequence; identical to SEQ ID NO: 229
  Fusion construct - activatable proprotein

SEQ ID NO: 243 - protein, 599 aa, Artificial Sequence; identical to SEQ ID NO: 239
  Fusion construct - activatable proprotein

SEQ ID NO: 244 - protein, 173 aa, Artificial Sequence; identical to SEQ ID NO: 240
  Fusion construct - activatable proprotein

SEQ ID NO: 245 - protein, 218 aa, Artificial Sequence; identical to SEQ ID NO: 230
  Fusion construct - activatable proprotein

SEQ ID NO: 246 - protein, 455 aa, Artificial Sequence; identical to SEQ ID NO: 232
  Fusion construct - activatable proprotein

SEQ ID NO: 247 - protein, 144 aa, Artificial Sequence
  Fusion construct - activatable proprotein
LAGGGSGGSTKKTQLQLEHLLLDLQMILNGINNYKNPKLTEMLTFEFYMPKKATELKHLQCLEEELKPLEEVLNLAQSKNFHLRPRDLISNINVIVLELKGSETTFMCEYADETATIVEFLNRWITFSQSIISTLTGGSGGSGR

SEQ ID NO: 248 - protein, 173 aa, Artificial Sequence; identical to SEQ ID NO: 240
  Fusion construct - activatable proprotein

SEQ ID NO: 249 - protein, 218 aa, Artificial Sequence; identical to SEQ ID NO: 230
  Fusion construct - activatable proprotein

SEQ ID NO: 250 - protein, 455 aa, Artificial Sequence; identical to SEQ ID NO: 232
  Fusion construct - activatable proprotein

SEQ ID NO: 251 - protein, 317 aa, Artificial Sequence; identical to SEQ ID NO: 233
  Fusion construct - activatable proprotein

SEQ ID NO: 252 - protein, 144 aa, Artificial Sequence; identical to SEQ ID NO: 247
  Fusion construct - activatable proprotein

SEQ ID NO: 253 - protein, 173 aa, Artificial Sequence; identical to SEQ ID NO: 240
  Fusion construct - activatable proprotein

SEQ ID NO: 254 - protein, 218 aa, Artificial Sequence; identical to SEQ ID NO: 230
  Fusion construct - activatable proprotein

SEQ ID NO: 255 - protein, 173 aa, Artificial Sequence; identical to SEQ ID NO: 240
  Fusion construct - activatable proprotein

SEQ ID NO: 256 - protein, 599 aa, Artificial Sequence; identical to SEQ ID NO: 239
  Fusion construct - activatable proprotein

SEQ ID NO: 257 - protein, 455 aa, Artificial Sequence; identical to SEQ ID NO: 232
  Fusion construct - activatable proprotein

SEQ ID NO: 258 - protein, 144 aa, Artificial Sequence; identical to SEQ ID NO: 247
  Fusion construct - activatable proprotein

SEQ ID NO: 259 - protein, 218 aa, Artificial Sequence; identical to SEQ ID NO: 230
  Fusion construct - activatable proprotein

SEQ ID NO: 260 - protein, 772 aa, Artificial Sequence; identical to SEQ ID NO: 229
  Fusion construct - activatable proprotein

SEQ ID NO: 261 - protein, 455 aa, Artificial Sequence; identical to SEQ ID NO: 232
  Fusion construct - activatable proprotein

SEQ ID NO: 262 - protein, 144 aa, Artificial Sequence; identical to SEQ ID NO: 247
  Fusion construct - activatable proprotein

SEQ ID NO: 263 - protein, 173 aa, Artificial Sequence; identical to SEQ ID NO: 240
  Fusion construct - activatable proprotein

SEQ ID NO: 264 - protein, 218 aa, Artificial Sequence; identical to SEQ ID NO: 230
  Fusion construct - activatable proprotein

SEQ ID NO: 265 - protein, 599 aa, Artificial Sequence; identical to SEQ ID NO: 239
  Fusion construct - activatable proprotein

SEQ ID NO: 266 - protein, 173 aa, Artificial Sequence; identical to SEQ ID NO: 240
  Fusion construct - activatable proprotein

SEQ ID NO: 267 - protein, 455 aa, Artificial Sequence; identical to SEQ ID NO: 232
  Fusion construct - activatable proprotein

SEQ ID NO: 268 - protein, 317 aa, Artificial Sequence; identical to SEQ ID NO: 233
  Fusion construct - activatable proprotein

SEQ ID NO: 269 - protein, 772 aa, Artificial Sequence
  Fusion construct - activatable proprotein
EVQLVQSGAEVKKPGESLKISCKGSGYTFTENIIHWVRQMPGKGLEWIGWFHPGSGSIKYNEKFKDQVTISADKSISTAYLQWSSLKASDTAMYFCARHGGTGRGAMDYWGQGTLVTVSSASTKGPSVFPLAPSSKSTSGGTAALGCLVKDYFPEPVTVSWNSGALTSGVHTFPAVLQSSGLYSLSSVVTVPSSSLGTQTYICNVNHKPSNTKVDKKVEPKSCDKTHTCPPCPAPEAAGGPSVFLFPPKPKDTLMISRTPEVTCVVVDVSHEDPEVKFNWYVDGVEVHNAKTKPREEQYNSTYRVVSVLTVLHQDWLNGKEYKCKVSNKALAAPIEKTISKAKGQPREPQVYTLPPSRDELTKNQVSLTCLVKGFYPSDIAVEWESNGQPENNYKTTPPVLDSDGSFFLYSKLTVDKSRWQQGNVFSCSVMHEALHNHYTQKSLSLSPGGGSPLGLAGGGSGGSTKKTQLQLEHLLLDLQMILNGINNYKNPKLTEMLTFKFYMPKKATELKHLQCLEKELKPLEEVLNLAQSKNFHLRPRDLISNINVIVLELKGSETTFMCEYADETATIVEFLNRWITFSQSIISTLTGGSGGSGRSDNQGGAELCDDKPPEIPHATFKAMAYKEGTMLNCECKRGFRRIESGSLYMLCTGNSSHSSWDNQCQCTSSATRNTTKQVTPQPEEQKERKTTEMQSPMQPVDQASLPGHCREPPPWENEATERIYHFVVGQMVYYQCVQGYRALHRGPAESVCKMTHGKTRWTQPQLICTGE

SEQ ID NO: 270 - protein, 218 aa, Artificial Sequence; identical to SEQ ID NO: 230
  Fusion construct - activatable proprotein

SEQ ID NO: 271 - protein, 772 aa, Artificial Sequence
  Fusion construct - activatable proprotein
EVQLVQSGAEVKKPGESLKISCKGSGYTFTENIIHWVRQMPGKGLEWIGWFHPGSGSIKYNEKFKDQVTISADKSISTAYLQWSSLKASDTAMYFCARHGGTGRGAMDYWGQGTLVTVSSASTKGPSVFPLAPSSKSTSGGTAALGCLVKDYFPEPVTVSWNSGALTSGVHTFPAVLQSSGLYSLSSVVTVPSSSLGTQTYICNVNHKPSNTKVDKKVEPKSCDKTHTCPPCPAPEAAGGPSVFLFPPKPKDTLMISRTPEVTCVVVDVSHEDPEVKFNWYVDGVEVHNAKTKPREEQYNSTYRVVSVLTVLHQDWLNGKEYKCKVSNKALAAPIEKTISKAKGQPREPQVYTLPPSRDELTKNQVSLTCLVKGFYPSDIAVEWESNGQPENNYKTTPPVLDSDGSFFLYSKLTVDKSRWQQGNVFSCSVMHEALHNHYTQKSLSLSPGGGSPLGLAGGGSGGSTKKTQLQLEHLLLDLQMILNGINNYKNPKLTEMLTFKFYMPKKATELKHLQCLEEKLKPLEEVLNLAQSKNFHLRPRDLISNINVIVLELKGSETTFMCEYADETATIVEFLNRWITFSQSIISTLTGGSGGSGRSDNQGGAELCDDKPPEIPHATFKAMAYKEGTMLNCECKRGFREIKSGSLYMLCTGNSSHSSWDNQCQCTSSATRNTTKQVTPQPEEQKERKTTEMQSPMQPVDQASLPGHCREPPPWENEATERIYHFVVGQMVYYQCVQGYRALHRGPAESVCKMTHGKTRWTQPQLICTGE

SEQ ID NO: 272 - protein, 218 aa, Artificial Sequence; identical to SEQ ID NO: 230
  Fusion construct - activatable proprotein

SEQ ID NO: 273 - protein, 772 aa, Artificial Sequence
  Fusion construct - activatable proprotein
EVQLVQSGAEVKKPGESLKISCKGSGYTFTENIIHWVRQMPGKGLEWIGWFHPGSGSIKYNEKFKDQVTISADKSISTAYLQWSSLKASDTAMYFCARHGGTGRGAMDYWGQGTLVTVSSASTKGPSVFPLAPSSKSTSGGTAALGCLVKDYFPEPVTVSWNSGALTSGVHTFPAVLQSSGLYSLSSVVTVPSSSLGTQTYICNVNHKPSNTKVDKKVEPKSCDKTHTCPPCPAPEAAGGPSVFLFPPKPKDTLMISRTPEVTCVVVDVSHEDPEVKFNWYVDGVEVHNAKTKPREEQYNSTYRVVSVLTVLHQDWLNGKEYKCKVSNKALAAPIEKTISKAKGQPREPQVYTLPPSRDELTKNQVSLTCLVKGFYPSDIAVEWESNGQPENNYKTTPPVLDSDGSFFLYSKLTVDKSRWQQGNVFSCSVMHEALHNHYTQKSLSLSPGGGSPLGLAGGGSGGSTKKTQLQLEHLLLDLQMILNGINNYKNPKLTEMLTFEFYMPKKATELKHLQCLEKELKPLEEVLNLAQSKNFHLRPRDLISNINVIVLELKGSETTFMCEYADETATIVEFLNRWITFSQSIISTLTGGSGGSGRSDNQGGAELCDDKPPEIPHATFKAMAYKEGTMLNCKCKRGFRRIESGSLYMLCTGNSSHSSWDNQCQCTSSATRNTTKQVTPQPEEQKERKTTEMQSPMQPVDQASLPGHCREPPPWENEATERIYHFVVGQMVYYQCVQGYRALHRGPAESVCKMTHGKTRWTQPQLICTGE

SEQ ID NO: 274 - protein, 218 aa, Artificial Sequence; identical to SEQ ID NO: 230
  Fusion construct - activatable proprotein

SEQ ID NO: 275 - protein, 772 aa, Artificial Sequence
  Fusion construct - activatable proprotein
EVQLVQSGAEVKKPGESLKISCKGSGYTFTENIIHWVRQMPGKGLEWIGWFHPGSGSIKYNEKFKDQVTISADKSISTAYLQWSSLKASDTAMYFCARHGGTGRGAMDYWGQGTLVTVSSASTKGPSVFPLAPSSKSTSGGTAALGCLVKDYFPEPVTVSWNSGALTSGVHTFPAVLQSSGLYSLSSVVTVPSSSLGTQTYICNVNHKPSNTKVDKKVEPKSCDKTHTCPPCPAPEAAGGPSVFLFPPKPKDTLMISRTPEVTCVVVDVSHEDPEVKFNWYVDGVEVHNAKTKPREEQYNSTYRVVSVLTVLHQDWLNGKEYKCKVSNKALAAPIEKTISKAKGQPREPQVYTLPPSRDELTKNQVSLTCLVKGFYPSDIAVEWESNGQPENNYKTTPPVLDSDGSFFLYSKLTVDKSRWQQGNVFSCSVMHEALHNHYTQKSLSLSPGGGSPLGLAGGGSGGSTKKTQLQLEHLLLDLQMILNGINNYKNPKLTEMLTFEFYMPKKATELKHLQCLEEKLKPLEEVLNLAQSKNFHLRPRDLISNINVIVLELKGSETTFMCEYADETATIVEFLNRWITFSQSIISTLTGGSGGSGRSDNQGGAELCDDKPPEIPHATFKAMAYKEGTMLNCKCKRGFREIKSGSLYMLCTGNSSHSSWDNQCQCTSSATRNTTKQVTPQPEEQKERKTTEMQSPMQPVDQASLPGHCREPPPWENEATERIYHFVVGQMVYYQCVQGYRALHRGPAESVCKMTHGKTRWTQPQLICTGE

SEQ ID NO: 276 - protein, 218 aa, Artificial Sequence; identical to SEQ ID NO: 230
  Fusion construct - activatable proprotein

SEQ ID NO: 277 - protein, 772 aa, Artificial Sequence
  Fusion construct - activatable proprotein
EVQLVQSGAEVKKPGESLKISCKGSGYTFTENIIHWVRQMPGKGLEWIGWFHPGSGSIKYNEKFKDQVTISADKSISTAYLQWSSLKASDTAMYFCARHGGTGRGAMDYWGQGTLVTVSSASTKGPSVFPLAPSSKSTSGGTAALGCLVKDYFPEPVTVSWNSGALTSGVHTFPAVLQSSGLYSLSSVVTVPSSSLGTQTYICNVNHKPSNTKVDKKVEPKSCDKTHTCPPCPAPEAAGGPSVFLFPPKPKDTLMISRTPEVTCVVVDVSHEDPEVKFNWYVDGVEVHNAKTKPREEQYNSTYRVVSVLTVLHQDWLNGKEYKCKVSNKALAAPIEKTISKAKGQPREPQVYTLPPSRDELTKNQVSLTCLVKGFYPSDIAVEWESNGQPENNYKTTPPVLDSDGSFFLYSKLTVDKSRWQQGNVFSCSVMHEALHNHYTQKSLSLSPGGGSPLGLAGGGSGGSTKKTQLQLEHLLLDLQMILNGINNYKNPKLTEMLTFKFYMPKKATELKHLQCLEKKLKPLEEVLNLAQSKNFHLRPRDLISNINVIVLELKGSETTFMCEYADETATIVEFLNRWITFSQSIISTLTGGSGGSGRSDNQGGAELCDDKPPEIPHATFKAMAYKEGTMLNCECKRGFREIESGSLYMLCTGNSSHSSWDNQCQCTSSATRNTTKQVTPQPEEQKERKTTEMQSPMQPVDQASLPGHCREPPPWENEATERIYHFVVGQMVYYQCVQGYRALHRGPAESVCKMTHGKTRWTQPQLICTGE

SEQ ID NO: 278 - protein, 218 aa, Artificial Sequence; identical to SEQ ID NO: 230
  Fusion construct - activatable proprotein

SEQ ID NO: 279 - protein, 772 aa, Artificial Sequence
  Fusion construct - activatable proprotein
EVQLVQSGAEVKKPGESLKISCKGSGYTFTENIIHWVRQMPGKGLEWIGWFHPGSGSIKYNEKFKDQVTISADKSISTAYLQWSSLKASDTAMYFCARHGGTGRGAMDYWGQGTLVTVSSASTKGPSVFPLAPSSKSTSGGTAALGCLVKDYFPEPVTVSWNSGALTSGVHTFPAVLQSSGLYSLSSVVTVPSSSLGTQTYICNVNHKPSNTKVDKKVEPKSCDKTHTCPPCPAPEAAGGPSVFLFPPKPKDTLMISRTPEVTCVVVDVSHEDPEVKFNWYVDGVEVHNAKTKPREEQYNSTYRVVSVLTVLHQDWLNGKEYKCKVSNKALAAPIEKTISKAKGQPREPQVYTLPPSRDELTKNQVSLTCLVKGFYPSDIAVEWESNGQPENNYKTTPPVLDSDGSFFLYSKLTVDKSRWQQGNVFSCSVMHEALHNHYTQKSLSLSPGGGSPLGLAGGGSGGSTKKTQLQLEHLLLDLQMILNGINNYKNPKLTEMLTFEFYMPKKATELKHLQCLEKKLKPLEEVLNLAQSKNFHLRPRDLISNINVIVLELKGSETTFMCEYADETATIVEFLNRWITFSQSIISTLTGGSGGSGRSDNQGGAELCDDKPPEIPHATFKAMAYKEGTMLNCKCKRGFREIESGSLYMLCTGNSSHSSWDNQCQCTSSATRNTTKQVTPQPEEQKERKTTEMQSPMQPVDQASLPGHCREPPPWENEATERIYHFVVGQMVYYQCVQGYRALHRGPAESVCKMTHGKTRWTQPQLICTGE

SEQ ID NO: 280 - protein, 218 aa, Artificial Sequence; identical to SEQ ID NO: 230
  Fusion construct - activatable proprotein

SEQ ID NO: 281 - protein, 772 aa, Artificial Sequence
  Fusion construct - activatable proprotein
EVQLVQSGAEVKKPGESLKISCKGSGYTFTENIIHWVRQMPGKGLEWIGWFHPGSGSIKYNEKFKDQVTISADKSISTAYLQWSSLKASDTAMYFCARHGGTGRGAMDYWGQGTLVTVSSASTKGPSVFPLAPSSKSTSGGTAALGCLVKDYFPEPVTVSWNSGALTSGVHTFPAVLQSSGLYSLSSVVTVPSSSLGTQTYICNVNHKPSNTKVDKKVEPKSCDKTHTCPPCPAPEAAGGPSVFLFPPKPKDTLMISRTPEVTCVVVDVSHEDPEVKFNWYVDGVEVHNAKTKPREEQYNSTYRVVSVLTVLHQDWLNGKEYKCKVSNKALAAPIEKTISKAKGQPREPQVYTLPPSRDELTKNQVSLTCLVKGFYPSDIAVEWESNGQPENNYKTTPPVLDSDGSFFLYSKLTVDKSRWQQGNVFSCSVMHEALHNHYTQKSLSLSPGGGSPLGLAGGGSGGSTKKTQLQLEHLLLDLQMILNGINNYKNPKLTEMLTFEFYMPKKATELKHLQCLEEKLKPLEEALNLAPSKNFHLRPRDLISNINVIVLELKGSETTFMCEYADETATIVEFLNRWITFSQSTISTLTGGSGGSGRSDNQGGAELCDDKPPEIPHATFKAMAYKEGTMLNCKCKRGFREIKSGSLYMLCTGNSSHSSWDNQCQCTSSATRNTTKQVTPQPEEQKERKTTEMQSPMQPVDQASLPGHCREPPPWENEATERIYHFVVGQMVYYQCVQGYRALHRGPAESVCKMTHGKTRWTQPQLICTGE

SEQ ID NO: 282 - protein, 218 aa, Artificial Sequence; identical to SEQ ID NO: 230
  Fusion construct - activatable proprotein

SEQ ID NO: 283 - protein, 772 aa, Artificial Sequence
  Fusion construct - activatable proprotein
EVQLVQSGAEVKKPGESLKISCKGSGYTFTENIIHWVRQMPGKGLEWIGWFHPGSGSIKYNEKFKDQVTISADKSISTAYLQWSSLKASDTAMYFCARHGGTGRGAMDYWGQGTLVTVSSASTKGPSVFPLAPSSKSTSGGTAALGCLVKDYFPEPVTVSWNSGALTSGVHTFPAVLQSSGLYSLSSVVTVPSSSLGTQTYICNVNHKPSNTKVDKKVEPKSCDKTHTCPPCPAPEAAGGPSVFLFPPKPKDTLMISRTPEVTCVVVDVSHEDPEVKFNWYVDGVEVHNAKTKPREEQYNSTYRVVSVLTVLHQDWLNGKEYKCKVSNKALAAPIEKTISKAKGQPREPQVYTLPPSRDELTKNQVSLTCLVKGFYPSDIAVEWESNGQPENNYKTTPPVLDSDGSFFLYSKLTVDKSRWQQGNVFSCSVMHEALHNHYTQKSLSLSPGGGSPLGLAGGGSGGSTKKTQLQLEHLLLDLQMILNGINNYKNPKLTEMLTFKFYMPKKATELKHLQCLEKKLKPLEEALNLAPSKNFHLRPRDLISNINVIVLELKGSETTFMCEYADETATIVEFLNRWITFSQSTISTLTGGSGGSGRSDNQGGAELCDDKPPEIPHATFKAMAYKEGTMLNCECKRGFREIESGSLYMLCTGNSSHSSWDNQCQCTSSATRNTTKQVTPQPEEQKERKTTEMQSPMQPVDQASLPGHCREPPPWENEATERIYHFVVGQMVYYQCVQGYRALHRGPAESVCKMTHGKTRWTQPQLICTGE

SEQ ID NO: 284 - protein, 218 aa, Artificial Sequence; identical to SEQ ID NO: 230
  Fusion construct - activatable proprotein

SEQ ID NO: 285 - protein, 772 aa, Artificial Sequence
  Fusion construct - activatable proprotein
EVQLVQSGAEVKKPGESLKISCKGSGYTFTENIIHWVRQMPGKGLEWIGWFHPGSGSIKYNEKFKDQVTISADKSISTAYLQWSSLKASDTAMYFCARHGGTGRGAMDYWGQGTLVTVSSASTKGPSVFPLAPSSKSTSGGTAALGCLVKDYFPEPVTVSWNSGALTSGVHTFPAVLQSSGLYSLSSVVTVPSSSLGTQTYICNVNHKPSNTKVDKKVEPKSCDKTHTCPPCPAPEAAGGPSVFLFPPKPKDTLMISRTPEVTCVVVDVSHEDPEVKFNWYVDGVEVHNAKTKPREEQYNSTYRVVSVLTVLHQDWLNGKEYKCKVSNKALAAPIEKTISKAKGQPREPQVYTLPPSRDELTKNQVSLTCLVKGFYPSDIAVEWESNGQPENNYKTTPPVLDSDGSFFLYSKLTVDKSRWQQGNVFSCSVMHEALHNHYTQKSLSLSPGGGSPLGLAGGGSGGSTKKTQLQLEHLLLDLQMILNGINNYKNPKLTEMLTFEFYMPKKATELKHLQCLEKKLKPLEEALNLAPSKNFHLRPRDLISNINVIVLELKGSETTFMCEYADETATIVEFLNRWITFSQSTISTLTGGSGGSGRSDNQGGAELCDDKPPEIPHATFKAMAYKEGTMLNCKCKRGFREIESGSLYMLCTGNSSHSSWDNQCQCTSSATRNTTKQVTPQPEEQKERKTTEMQSPMQPVDQASLPGHCREPPPWENEATERIYHFVVGQMVYYQCVQGYRALHRGPAESVCKMTHGKTRWTQPQLICTGE

SEQ ID NO: 286 - protein, 218 aa, Artificial Sequence; identical to SEQ ID NO: 230
  Fusion construct - activatable proprotein

SEQ ID NO: 287 - protein, 772 aa, Artificial Sequence
  Fusion construct - activatable proprotein
EVQLVQSGAEVKKPGESLKISCKGSGYTFTENIIHWVRQMPGKGLEWIGWFHPGSGSIKYNEKFKDQVTISADKSISTAYLQWSSLKASDTAMYFCARHGGTGRGAMDYWGQGTLVTVSSASTKGPSVFPLAPSSKSTSGGTAALGCLVKDYFPEPVTVSWNSGALTSGVHTFPAVLQSSGLYSLSSVVTVPSSSLGTQTYICNVNHKPSNTKVDKKVEPKSCDKTHTCPPCPAPEAAGGPSVFLFPPKPKDTLMISRTPEVTCVVVDVSHEDPEVKFNWYVDGVEVHNAKTKPREEQYNSTYRVVSVLTVLHQDWLNGKEYKCKVSNKALAAPIEKTISKAKGQPREPQVYTLPPSRDELTKNQVSLTCLVKGFYPSDIAVEWESNGQPENNYKTTPPVLDSDGSFFLYSKLTVDKSRWQQGNVFSCSVMHEALHNHYTQKSLSLSPGGGSPLGLAGGGSGGSTKKTQLQLEHLLLDLQMILNGINNYKNPKLTRMLTFEFYMPKKATELKHLQCLEEKLKPLEEVLNLAQSKNFHLRPRDLISNINVIVLELKGSETTFMCEYADETATIVEFLNRWITFSQSIISTLTGGSGGSGRSDNQGGAELCDDDPPEIPHATFKAMAYKEGTMLNCKCKRGFREIKSGSLYMLCTGNSSHSSWDNQCQCTSSATRNTTKQVTPQPEEQKERKTTEMQSPMQPVDQASLPGHCREPPPWENEATERIYHFVVGQMVYYQCVQGYRALHRGPAESVCKMTHGKTRWTQPQLICTGE

SEQ ID NO: 288 - protein, 218 aa, Artificial Sequence; identical to SEQ ID NO: 230
  Fusion construct - activatable proprotein

SEQ ID NO: 289 - protein, 772 aa, Artificial Sequence
  Fusion construct - activatable proprotein
EVQLVQSGAEVKKPGESLKISCKGSGYTFTENIIHWVRQMPGKGLEWIGWFHPGSGSIKYNEKFKDQVTISADKSISTAYLQWSSLKASDTAMYFCARHGGTGRGAMDYWGQGTLVTVSSASTKGPSVFPLAPSSKSTSGGTAALGCLVKDYFPEPVTVSWNSGALTSGVHTFPAVLQSSGLYSLSSVVTVPSSSLGTQTYICNVNHKPSNTKVDKKVEPKSCDKTHTCPPCPAPEAAGGPSVFLFPPKPKDTLMISRTPEVTCVVVDVSHEDPEVKFNWYVDGVEVHNAKTKPREEQYNSTYRVVSVLTVLHQDWLNGKEYKCKVSNKALAAPIEKTISKAKGQPREPQVYTLPPSRDELTKNQVSLTCLVKGFYPSDIAVEWESNGQPENNYKTTPPVLDSDGSFFLYSKLTVDKSRWQQGNVFSCSVMHEALHNHYTQKSLSLSPGGGSPLGLAGGGSGGSTKKTQLQLEHLLLDLQMILNGINNYKNPKLTRMLTFEFYMPKKATELKHLQCLEEKLKPLEEVLNLAQSKNFHLRPRDLISNINVIVLELKGSETTFMCEYADETATIVEFLNRWITFSQSIISTLTGGSGGSGRSDNQGGAELCDDEPPEIPHATFKAMAYKEGTMLNCKCKRGFREIKSGSLYMLCTGNSSHSSWDNQCQCTSSATRNTTKQVTPQPEEQKERKTTEMQSPMQPVDQASLPGHCREPPPWENEATERIYHFVVGQMVYYQCVQGYRALHRGPAESVCKMTHGKTRWTQPQLICTGE

SEQ ID NO: 290 - protein, 218 aa, Artificial Sequence; identical to SEQ ID NO: 230
  Fusion construct - activatable proprotein

SEQ ID NO: 291 - protein, 772 aa, Artificial Sequence
  Fusion construct - activatable proprotein
EVQLVQSGAEVKKPGESLKISCKGSGYTFTENIIHWVRQMPGKGLEWIGWFHPGSGSIKYNEKFKDQVTISADKSISTAYLQWSSLKASDTAMYFCARHGGTGRGAMDYWGQGTLVTVSSASTKGPSVFPLAPSSKSTSGGTAALGCLVKDYFPEPVTVSWNSGALTSGVHTFPAVLQSSGLYSLSSVVTVPSSSLGTQTYICNVNHKPSNTKVDKKVEPKSCDKTHTCPPCPAPEAAGGPSVFLFPPKPKDTLMISRTPEVTCVVVDVSHEDPEVKFNWYVDGVEVHNAKTKPREEQYNSTYRVVSVLTVLHQDWLNGKEYKCKVSNKALAAPIEKTISKAKGQPREPQVYTLPPSRDELTKNQVSLTCLVKGFYPSDIAVEWESNGQPENNYKTTPPVLDSDGSFFLYSKLTVDKSRWQQGNVFSCSVMHEALHNHYTQKSLSLSPGGGSPLGLAGGGSGGSTKKTQLQLEHLLLDLQMILNGINNYKNPKLTRMLTFEFYMPKKATELKHLQCLEKKLKPLEEVLNLAQSKNFHLRPRDLISNINVIVLELKGSETTFMCEYADETATIVEFLNRWITFSQSIISTLTGGSGGSGRSDNQGGAELCDDDPPEIPHATFKAMAYKEGTMLNCKCKRGFREIESGSLYMLCTGNSSHSSWDNQCQCTSSATRNTTKQVTPQPEEQKERKTTEMQSPMQPVDQASLPGHCREPPPWENEATERIYHFVVGQMVYYQCVQGYRALHRGPAESVCKMTHGKTRWTQPQLICTGE

SEQ ID NO: 292 - protein, 218 aa, Artificial Sequence; identical to SEQ ID NO: 230
  Fusion construct - activatable proprotein

SEQ ID NO: 293 - protein, 772 aa, Artificial Sequence
  Fusion construct - activatable proprotein
EVQLVQSGAEVKKPGESLKISCKGSGYTFTENIIHWVRQMPGKGLEWIGWFHPGSGSIKYNEKFKDQVTISADKSISTAYLQWSSLKASDTAMYFCARHGGTGRGAMDYWGQGTLVTVSSASTKGPSVFPLAPSSKSTSGGTAALGCLVKDYFPEPVTVSWNSGALTSGVHTFPAVLQSSGLYSLSSVVTVPSSSLGTQTYICNVNHKPSNTKVDKKVEPKSCDKTHTCPPCPAPEAAGGPSVFLFPPKPKDTLMISRTPEVTCVVVDVSHEDPEVKFNWYVDGVEVHNAKTKPREEQYNSTYRVVSVLTVLHQDWLNGKEYKCKVSNKALAAPIEKTISKAKGQPREPQVYTLPPSRDELTKNQVSLTCLVKGFYPSDIAVEWESNGQPENNYKTTPPVLDSDGSFFLYSKLTVDKSRWQQGNVFSCSVMHEALHNHYTQKSLSLSPGGGSPLGLAGGGSGGSTKKTQLQLEHLLLDLQMILNGINNYKNPKLTRMLTFEFYMPKKATELKHLQCLEKKLKPLEEVLNLAQSKNFHLRPRDLISNINVIVLELKGSETTFMCEYADETATIVEFLNRWITFSQSIISTLTGGSGGSGRSDNQGGAELCDDEPPEIPHATFKAMAYKEGTMLNCKCKRGFREIESGSLYMLCTGNSSHSSWDNQCQCTSSATRNTTKQVTPQPEEQKERKTTEMQSPMQPVDQASLPGHCREPPPWENEATERIYHFVVGQMVYYQCVQGYRALHRGPAESVCKMTHGKTRWTQPQLICTGE

SEQ ID NO: 294 - protein, 218 aa, Artificial Sequence; identical to SEQ ID NO: 230
  Fusion construct - activatable proprotein

SEQ ID NO: 295 - protein, 772 aa, Artificial Sequence
  Fusion construct - activatable proprotein
EVQLVQSGAEVKKPGESLKISCKGSGYTFTENIIHWVRQMPGKGLEWIGWFHPGSGSIKYNEKFKDQVTISADKSISTAYLQWSSLKASDTAMYFCARHGGTGRGAMDYWGQGTLVTVSSASTKGPSVFPLAPSSKSTSGGTAALGCLVKDYFPEPVTVSWNSGALTSGVHTFPAVLQSSGLYSLSSVVTVPSSSLGTQTYICNVNHKPSNTKVDKKVEPKSCDKTHTCPPCPAPEAAGGPSVFLFPPKPKDTLMISRTPEVTCVVVDVSHEDPEVKFNWYVDGVEVHNAKTKPREEQYNSTYRVVSVLTVLHQDWLNGKEYKCKVSNKALAAPIEKTISKAKGQPREPQVYTLPPSRDELTKNQVSLTCLVKGFYPSDIAVEWESNGQPENNYKTTPPVLDSDGSFFLYSKLTVDKSRWQQGNVFSCSVMHEALHNHYTQKSLSLSPGGGSGGSGGSGGSGGSTKKTQLQLEHLLLDLQMILNGINNYKNPKLTEMLTFEFYMPKKATELKHLQCLEKKLKPLEEVLNLAQSKNFHLRPRDLISNINVIVLELKGSETTFMCEYADETATIVEFLNRWITFSQSIISTLTGGSGGSGGSGGSGGAELCDDKPPEIPHATFKAMAYKEGTMLNCKCKRGFREIESGSLYMLCTGNSSHSSWDNQCQCTSSATRNTTKQVTPQPEEQKERKTTEMQSPMQPVDQASLPGHCREPPPWENEATERIYHFVVGQMVYYQCVQGYRALHRGPAESVCKMTHGKTRWTQPQLICTGE

SEQ ID NO: 296 - protein, 218 aa, Artificial Sequence; identical to SEQ ID NO: 230
  Fusion construct - activatable proprotein

SEQ ID NO: 297 - protein, 772 aa, Artificial Sequence
  Fusion construct - activatable proprotein
EVQLVQSGAEVKKPGESLKISCKGSGYTFTENIIHWVRQMPGKGLEWIGWFHPGSGSIKYNEKFKDQVTISADKSISTAYLQWSSLKASDTAMYFCARHGGTGRGAMDYWGQGTLVTVSSASTKGPSVFPLAPSSKSTSGGTAALGCLVKDYFPEPVTVSWNSGALTSGVHTFPAVLQSSGLYSLSSVVTVPSSSLGTQTYICNVNHKPSNTKVDKKVEPKSCDKTHTCPPCPAPEAAGGPSVFLFPPKPKDTLMISRTPEVTCVVVDVSHEDPEVKFNWYVDGVEVHNAKTKPREEQYNSTYRVVSVLTVLHQDWLNGKEYKCKVSNKALAAPIEKTISKAKGQPREPQVYTLPPSRDELTKNQVSLTCLVKGFYPSDIAVEWESNGQPENNYKTTPPVLDSDGSFFLYSKLTVDKSRWQQGNVFSCSVMHEALHNHYTQKSLSLSPGGGSPLGLAGGGSGGSTKKTQLQLEHLLLDLQMILNGINNYKNPKLTEMLTFEFYMPKKATELKHLQCLEERLKPLEEVLNLAQSKNFHLRPRDLISNINVIVLELKGSETTFMCEYADETATIVEFLNRWITFSQSIISTLTGGSGGSGRSDNQGGAELCDDKPPEIPHATFKAMAYKEGTMLNCKCKRGFREIKSGSLYMLCTGNSSHSSWDNQCQCTSSATRNTTKQVTPQPEEQKERKTTEMQSPMQPVDQASLPGHCREPPPWENEATERIYHFVVGQMVYYQCVQGYRALHRGPAESVCKMTHGKTRWTQPQLICTGE

SEQ ID NO: 298 - protein, 218 aa, Artificial Sequence; identical to SEQ ID NO: 230
  Fusion construct - activatable proprotein

SEQ ID NO: 299 - protein, 772 aa, Artificial Sequence
  Fusion construct - activatable proprotein
EVQLVQSGAEVKKPGESLKISCKGSGYTFTENIIHWVRQMPGKGLEWIGWFHPGSGSIKYNEKFKDQVTISADKSISTAYLQWSSLKASDTAMYFCARHGGTGRGAMDYWGQGTLVTVSSASTKGPSVFPLAPSSKSTSGGTAALGCLVKDYFPEPVTVSWNSGALTSGVHTFPAVLQSSGLYSLSSVVTVPSSSLGTQTYICNVNHKPSNTKVDKKVEPKSCDKTHTCPPCPAPEAAGGPSVFLFPPKPKDTLMISRTPEVTCVVVDVSHEDPEVKFNWYVDGVEVHNAKTKPREEQYNSTYRVVSVLTVLHQDWLNGKEYKCKVSNKALAAPIEKTISKAKGQPREPQVYTLPPSRDELTKNQVSLTCLVKGFYPSDIAVEWESNGQPENNYKTTPPVLDSDGSFFLYSKLTVDKSRWQQGNVFSCSVMHEALHNHYTQKSLSLSPGGGSPLGLAGGGSGGSTKKTQLQLEHLLLDLQMILNGINNYKNPKLTEMLTFEFYMPKKATELKHLQCLEEMLKPLEEVLNLAQSKNFHLRPRDLISNINVIVLELKGSETTFMCEYADETATIVEFLNRWITFSQSIISTLTGGSGGSGRSDNQGGAELCDDKPPEIPHATFKAMAYKEGTMLNCKCKRGFRMIKSGSLYMLCTGNSSHSSWDNQCQCTSSATRNTTKQVTPQPEEQKERKTTEMQSPMQPVDQASLPGHCREPPPWENEATERIYHFVVGQMVYYQCVQGYRALHRGPAESVCKMTHGKTRWTQPQLICTGE

SEQ ID NO: 300 - protein, 218 aa, Artificial Sequence; identical to SEQ ID NO: 230
  Fusion construct - activatable proprotein

SEQ ID NO: 301 - protein, 772 aa, Artificial Sequence
  Fusion construct - activatable proprotein
EVQLVQSGAEVKKPGESLKISCKGSGYTFTENIIHWVRQMPGKGLEWIGWFHPGSGSIKYNEKFKDQVTISADKSISTAYLQWSSLKASDTAMYFCARHGGTGRGAMDYWGQGTLVTVSSASTKGPSVFPLAPSSKSTSGGTAALGCLVKDYFPEPVTVSWNSGALTSGVHTFPAVLQSSGLYSLSSVVTVPSSSLGTQTYICNVNHKPSNTKVDKKVEPKSCDKTHTCPPCPAPEAAGGPSVFLFPPKPKDTLMISRTPEVTCVVVDVSHEDPEVKFNWYVDGVEVHNAKTKPREEQYNSTYRVVSVLTVLHQDWLNGKEYKCKVSNKALAAPIEKTISKAKGQPREPQVYTLPPSRDELTKNQVSLTCLVKGFYPSDIAVEWESNGQPENNYKTTPPVLDSDGSFFLYSKLTVDKSRWQQGNVFSCSVMHEALHNHYTQKSLSLSPGGGSPLGLAGGGSGGSTKKTQLQLEHLLLDLQMILNGINNYKNPKLTEMLTFEFYMPKKATELKHLQCLEEMLKPLEEVLNLAQSKNFHLRPRDLISNINVIVLELKGSETTFMCEYADETATIVEFLNRWITFSQSIISTLTGGSGGSGRSDNQGGAELCDDKPPEIPHATFKAMAYKEGTMLNCKCKRGFRFIKSGSLYMLCTGNSSHSSWDNQCQCTSSATRNTTKQVTPQPEEQKERKTTEMQSPMQPVDQASLPGHCREPPPWENEATERIYHFVVGQMVYYQCVQGYRALHRGPAESVCKMTHGKTRWTQPQLICTGE

SEQ ID NO: 302 - protein, 218 aa, Artificial Sequence; identical to SEQ ID NO: 230
  Fusion construct - activatable proprotein

SEQ ID NO: 303 - protein, 772 aa, Artificial Sequence
  Fusion construct - activatable proprotein
EVQLVQSGAEVKKPGESLKISCKGSGYTFTENIIHWVRQMPGKGLEWIGWFHPGSGSIKYNEKFKDQVTISADKSISTAYLQWSSLKASDTAMYFCARHGGTGRGAMDYWGQGTLVTVSSASTKGPSVFPLAPSSKSTSGGTAALGCLVKDYFPEPVTVSWNSGALTSGVHTFPAVLQSSGLYSLSSVVTVPSSSLGTQTYICNVNHKPSNTKVDKKVEPKSCDKTHTCPPCPAPEAAGGPSVFLFPPKPKDTLMISRTPEVTCVVVDVSHEDPEVKFNWYVDGVEVHNAKTKPREEQYNSTYRVVSVLTVLHQDWLNGKEYKCKVSNKALAAPIEKTISKAKGQPREPQVYTLPPSRDELTKNQVSLTCLVKGFYPSDIAVEWESNGQPENNYKTTPPVLDSDGSFFLYSKLTVDKSRWQQGNVFSCSVMHEALHNHYTQKSLSLSPGGGSPLGLAGGGSGGSTKKTQLQLEHLLLDLQMILNGINNYKNPKLTEMLTFEFYMPKKATELKHLQCLEELLKPLEEVLNLAQSKNFHLRPRDLISNINVIVLELKGSETTFMCEYADETATIVEFLNRWITFSQSIISTLTGGSGGSGRSDNQGGAELCDDKPPEIPHATFKAMAYKEGTMLNCKCKRGFRFIKSGSLYMLCTGNSSHSSWDNQCQCTSSATRNTTKQVTPQPEEQKERKTTEMQSPMQPVDQASLPGHCREPPPWENEATERIYHFVVGQMVYYQCVQGYRALHRGPAESVCKMTHGKTRWTQPQLICTGE

SEQ ID NO: 304 - protein, 218 aa, Artificial Sequence; identical to SEQ ID NO: 230
  Fusion construct - activatable proprotein

SEQ ID NO: 305 - protein, 772 aa, Artificial Sequence
  Fusion construct - activatable proprotein
EVQLVQSGAEVKKPGESLKISCKGSGYTFTENIIHWVRQMPGKGLEWIGWFHPGSGSIKYNEKFKDQVTISADKSISTAYLQWSSLKASDTAMYFCARHGGTGRGAMDYWGQGTLVTVSSASTKGPSVFPLAPSSKSTSGGTAALGCLVKDYFPEPVTVSWNSGALTSGVHTFPAVLQSSGLYSLSSVVTVPSSSLGTQTYICNVNHKPSNTKVDKKVEPKSCDKTHTCPPCPAPEAAGGPSVFLFPPKPKDTLMISRTPEVTCVVVDVSHEDPEVKFNWYVDGVEVHNAKTKPREEQYNSTYRVVSVLTVLHQDWLNGKEYKCKVSNKALAAPIEKTISKAKGQPREPQVYTLPPSRDELTKNQVSLTCLVKGFYPSDIAVEWESNGQPENNYKTTPPVLDSDGSFFLYSKLTVDKSRWQQGNVFSCSVMHEALHNHYTQKSLSLSPGGGSPLGLAGGGSGGSTKKTQLQLEHLLLDLQMILNGINNYKNPELTEMLTFEFYMPKKATELKHLQCLEEELKPLEEVLNLAQSKNFHLRPRDLISNINVIVLELKGSETTFMCEYADETATIVEFLNRWITFSQSIISTLTGGSGGSGRSDNQGGAELCKDKPPEIPHATFKAMAYKEGTMLNCKCKRGFRRIKSGSLYMLCTGNSSHSSWDNQCQCTSSATRNTTKQVTPQPEEQKERKTTEMQSPMQPVDQASLPGHCREPPPWENEATERIYHFVVGQMVYYQCVQGYRALHRGPAESVCKMTHGKTRWTQPQLICTGE

SEQ ID NO: 306 - protein, 218 aa, Artificial Sequence; identical to SEQ ID NO: 230
  Fusion construct - activatable proprotein

SEQ ID NO: 307 - protein, 772 aa, Artificial Sequence
  Fusion construct - activatable proprotein
EVQLVQSGAEVKKPGESLKISCKGSGYTFTENIIHWVRQMPGKGLEWIGWFHPGSGSIKYNEKFKDQVTISADKSISTAYLQWSSLKASDTAMYFCARHGGTGRGAMDYWGQGTLVTVSSASTKGPSVFPLAPSSKSTSGGTAALGCLVKDYFPEPVTVSWNSGALTSGVHTFPAVLQSSGLYSLSSVVTVPSSSLGTQTYICNVNHKPSNTKVDKKVEPKSCDKTHTCPPCPAPEAAGGPSVFLFPPKPKDTLMISRTPEVTCVVVDVSHEDPEVKFNWYVDGVEVHNAKTKPREEQYNSTYRVVSVLTVLHQDWLNGKEYKCKVSNKALAAPIEKTISKAKGQPREPQVYTLPPSRDELTKNQVSLTCLVKGFYPSDIAVEWESNGQPENNYKTTPPVLDSDGSFFLYSKLTVDKSRWQQGNVFSCSVMHEALHNHYTQKSLSLSPGGGSPLGLAGGGSGGSTKKTQLQLEHLLLDLQMILNGINNYKNPELTEMLTFKFYMPKKATELKHLQCLEKELKPLEEVLNLAQSKNFHLRPRDLISNINVIVLELKGSETTFMCEYADETATIVEFLNRWITFSQSIISTLTGGSGGSGRSDNQGGAELCKDKPPEIPHATFKAMAYKEGTMLNCECKRGFRRIESGSLYMLCTGNSSHSSWDNQCQCTSSATRNTTKQVTPQPEEQKERKTTEMQSPMQPVDQASLPGHCREPPPWENEATERIYHFVVGQMVYYQCVQGYRALHRGPAESVCKMTHGKTRWTQPQLICTGE

SEQ ID NO: 308 - protein, 218 aa, Artificial Sequence; identical to SEQ ID NO: 230
  Fusion construct - activatable proprotein

SEQ ID NO: 309 - protein, 772 aa, Artificial Sequence
  Fusion construct - activatable proprotein
EVQLVQSGAEVKKPGESLKISCKGSGYTFTENIIHWVRQMPGKGLEWIGWFHPGSGSIKYNEKFKDQVTISADKSISTAYLQWSSLKASDTAMYFCARHGGTGRGAMDYWGQGTLVTVSSASTKGPSVFPLAPSSKSTSGGTAALGCLVKDYFPEPVTVSWNSGALTSGVHTFPAVLQSSGLYSLSSVVTVPSSSLGTQTYICNVNHKPSNTKVDKKVEPKSCDKTHTCPPCPAPEAAGGPSVFLFPPKPKDTLMISRTPEVTCVVVDVSHEDPEVKFNWYVDGVEVHNAKTKPREEQYNSTYRVVSVLTVLHQDWLNGKEYKCKVSNKALAAPIEKTISKAKGQPREPQVYTLPPSRDELTKNQVSLTCLVKGFYPSDIAVEWESNGQPENNYKTTPPVLDSDGSFFLYSKLTVDKSRWQQGNVFSCSVMHEALHNHYTQKSLSLSPGGGSPLGLAGGGSGGSTKKTQLQLEHLLLDLQMILNGINNYKNPKLTRMLTFKFYMPKKATELKHLQCLEEELKPLEEVLNLAQSKNFHLRPRDLISNINVIVLELKGSETTFMCEYADETATIVEFLNRWITFSQSIISTLTGGSGGSGRSDNQGGAELCDDDPPEIPHATFKAMAYKEGTMLNCECKRGFRRIKSGSLYMLCTGNSSHSSWDNQCQCTSSATRNTTKQVTPQPEEQKERKTTEMQSPMQPVDQASLPGHCREPPPWENEATERIYHFVVGQMVYYQCVQGYRALHRGPAESVCKMTHGKTRWTQPQLICTGE

SEQ ID NO: 310 - protein, 218 aa, Artificial Sequence; identical to SEQ ID NO: 230
  Fusion construct - activatable proprotein

SEQ ID NO: 311 - protein, 772 aa, Artificial Sequence
  Fusion construct - activatable proprotein
EVQLVQSGAEVKKPGESLKISCKGSGYTFTENIIHWVRQMPGKGLEWIGWFHPGSGSIKYNEKFKDQVTISADKSISTAYLQWSSLKASDTAMYFCARHGGTGRGAMDYWGQGTLVTVSSASTKGPSVFPLAPSSKSTSGGTAALGCLVKDYFPEPVTVSWNSGALTSGVHTFPAVLQSSGLYSLSSVVTVPSSSLGTQTYICNVNHKPSNTKVDKKVEPKSCDKTHTCPPCPAPEAAGGPSVFLFPPKPKDTLMISRTPEVTCVVVDVSHEDPEVKFNWYVDGVEVHNAKTKPREEQYNSTYRVVSVLTVLHQDWLNGKEYKCKVSNKALAAPIEKTISKAKGQPREPQVYTLPPSRDELTKNQVSLTCLVKGFYPSDIAVEWESNGQPENNYKTTPPVLDSDGSFFLYSKLTVDKSRWQQGNVFSCSVMHEALHNHYTQKSLSLSPGGGSPLGLAGGGSGGSTKKTQLQLEHLLLDLQMILNGINNYKNPKLTRMLTAKFYMPKKATELKHLQCLEEELKPLEEVLNLAQSKNFHLRPRDLISNINVIVLELKGSETTFMCEYADETATIVEFLNRWITFSQSIISTLTGGSGGSGRSDNQGGAELCDDDPPEIPHATFKAMAYKEGTMLYCECKRGFRRIKSGSLYMLCTGNSSHSSWDNQCQCTSSATRNTTKQVTPQPEEQKERKTTEMQSPMQPVDQASLPGHCREPPPWENEATERIYHFVVGQMVYYQCVQGYRALHRGPAESVCKMTHGKTRWTQPQLICTGE

SEQ ID NO: 312 - protein, 218 aa, Artificial Sequence; identical to SEQ ID NO: 230
  Fusion construct - activatable proprotein

SEQ ID NO: 313 - protein, 772 aa, Artificial Sequence
  Fusion construct - activatable proprotein
EVQLVQSGAEVKKPGESLKISCKGSGYTFTENIIHWVRQMPGKGLEWIGWFHPGSGSIKYNEKFKDQVTISADKSISTAYLQWSSLKASDTAMYFCARHGGTGRGAMDYWGQGTLVTVSSASTKGPSVFPLAPSSKSTSGGTAALGCLVKDYFPEPVTVSWNSGALTSGVHTFPAVLQSSGLYSLSSVVTVPSSSLGTQTYICNVNHKPSNTKVDKKVEPKSCDKTHTCPPCPAPEAAGGPSVFLFPPKPKDTLMISRTPEVTCVVVDVSHEDPEVKFNWYVDGVEVHNAKTKPREEQYNSTYRVVSVLTVLHQDWLNGKEYKCKVSNKALAAPIEKTISKAKGQPREPQVYTLPPSRDELTKNQVSLTCLVKGFYPSDIAVEWESNGQPENNYKTTPPVLDSDGSFFLYSKLTVDKSRWQQGNVFSCSVMHEALHNHYTQKSLSLSPGGGSPLGLAGGGSGGSTKKTQLQLEHLLLDLQMILNGINNYKNPKLTRMLTKKFYMPKKATELKHLQCLEEELKPLEEVLNLAQSKNFHLRPRDLISNINVIVLELKGSETTFMCEYADETATIVEFLNRWITFSQSIISTLTGGSGGSGRSDNQGGAELCDDDPPEIPHATFKAMAYKEGTMLDCECKRGFRRIKSGSLYMLCTGNSSHSSWDNQCQCTSSATRNTTKQVTPQPEEQKERKTTEMQSPMQPVDQASLPGHCREPPPWENEATERIYHFVVGQMVYYQCVQGYRALHRGPAESVCKMTHGKTRWTQPQLICTGE

SEQ ID NO: 314 - protein, 218 aa, Artificial Sequence; identical to SEQ ID NO: 230
  Fusion construct - activatable proprotein

SEQ ID NO: 315 - protein, 772 aa, Artificial Sequence
  Fusion construct - activatable proprotein
EVQLVQSGAEVKKPGESLKISCKGSGYTFTENIIHWVRQMPGKGLEWIGWFHPGSGSIKYNEKFKDQVTISADKSISTAYLQWSSLKASDTAMYFCARHGGTGRGAMDYWGQGTLVTVSSASTKGPSVFPLAPSSKSTSGGTAALGCLVKDYFPEPVTVSWNSGALTSGVHTFPAVLQSSGLYSLSSVVTVPSSSLGTQTYICNVNHKPSNTKVDKKVEPKSCDKTHTCPPCPAPEAAGGPSVFLFPPKPKDTLMISRTPEVTCVVVDVSHEDPEVKFNWYVDGVEVHNAKTKPREEQYNSTYRVVSVLTVLHQDWLNGKEYKCKVSNKALAAPIEKTISKAKGQPREPQVYTLPPSRDELTKNQVSLTCLVKGFYPSDIAVEWESNGQPENNYKTTPPVLDSDGSFFLYSKLTVDKSRWQQGNVFSCSVMHEALHNHYTQKSLSLSPGGGSPLGLAGGGSGGSTKKTQLQLEHLLLDLQMILNGINNYKNPKLTRMLTRKFYMPKKATELKHLQCLEEELKPLEEVLNLAQSKNFHLRPRDLISNINVIVLELKGSETTFMCEYADETATIVEFLNRWITFSQSIISTLTGGSGGSGRSDNQGGAELCDDDPPEIPHATFKAMAYKEGTMLDCECKRGFRRIKSGSLYMLCTGNSSHSSWDNQCQCTSSATRNTTKQVTPQPEEQKERKTTEMQSPMQPVDQASLPGHCREPPPWENEATERIYHFVVGQMVYYQCVQGYRALHRGPAESVCKMTHGKTRWTQPQLICTGE

SEQ ID NO: 316 - protein, 218 aa, Artificial Sequence; identical to SEQ ID NO: 230
  Fusion construct - activatable proprotein

SEQ ID NO: 317 - protein, 772 aa, Artificial Sequence
  Fusion construct - activatable proprotein
EVQLVQSGAEVKKPGESLKISCKGSGYTFTENIIHWVRQMPGKGLEWIGWFHPGSGSIKYNEKFKDQVTISADKSISTAYLQWSSLKASDTAMYFCARHGGTGRGAMDYWGQGTLVTVSSASTKGPSVFPLAPSSKSTSGGTAALGCLVKDYFPEPVTVSWNSGALTSGVHTFPAVLQSSGLYSLSSVVTVPSSSLGTQTYICNVNHKPSNTKVDKKVEPKSCDKTHTCPPCPAPEAAGGPSVFLFPPKPKDTLMISRTPEVTCVVVDVSHEDPEVKFNWYVDGVEVHNAKTKPREEQYNSTYRVVSVLTVLHQDWLNGKEYKCKVSNKALAAPIEKTISKAKGQPREPQVYTLPPSRDELTKNQVSLTCLVKGFYPSDIAVEWESNGQPENNYKTTPPVLDSDGSFFLYSKLTVDKSRWQQGNVFSCSVMHEALHNHYTQKSLSLSPGGGSPLGLAGGGSGGSTKKTQLQLEHLLLDLQMILNGINNYKNPELTEMLTAKFYMPKKATELKHLQCLEKELKPLEEVLNLAQSKNFHLRPRDLISNINVIVLELKGSETTFMCEYADETATIVEFLNRWITFSQSIISTLTGGSGGSGRSDNQGGAELCKDKPPEIPHATFKAMAYKEGTMLYCECKRGFRRIESGSLYMLCTGNSSHSSWDNQCQCTSSATRNTTKQVTPQPEEQKERKTTEMQSPMQPVDQASLPGHCREPPPWENEATERIYHFVVGQMVYYQCVQGYRALHRGPAESVCKMTHGKTRWTQPQLICTGE

SEQ ID NO: 318 - protein, 218 aa, Artificial Sequence; identical to SEQ ID NO: 230
  Fusion construct - activatable proprotein

SEQ ID NO: 319 - protein, 772 aa, Artificial Sequence
  Fusion construct - activatable proprotein
EVQLVQSGAEVKKPGESLKISCKGSGYTFTENIIHWVRQMPGKGLEWIGWFHPGSGSIKYNEKFKDQVTISADKSISTAYLQWSSLKASDTAMYFCARHGGTGRGAMDYWGQGTLVTVSSASTKGPSVFPLAPSSKSTSGGTAALGCLVKDYFPEPVTVSWNSGALTSGVHTFPAVLQSSGLYSLSSVVTVPSSSLGTQTYICNVNHKPSNTKVDKKVEPKSCDKTHTCPPCPAPEAAGGPSVFLFPPKPKDTLMISRTPEVTCVVVDVSHEDPEVKFNWYVDGVEVHNAKTKPREEQYNSTYRVVSVLTVLHQDWLNGKEYKCKVSNKALAAPIEKTISKAKGQPREPQVYTLPPSRDELTKNQVSLTCLVKGFYPSDIAVEWESNGQPENNYKTTPPVLDSDGSFFLYSKLTVDKSRWQQGNVFSCSVMHEALHNHYTQKSLSLSPGGGSPLGLAGGGSGGSTKKTQLQLEHLLLDLQMILNGINNYKNPELTEMLTKKFYMPKKATELKHLQCLEKELKPLEEVLNLAQSKNFHLRPRDLISNINVIVLELKGSETTFMCEYADETATIVEFLNRWITFSQSIISTLTGGSGGSGRSDNQGGAELCKDKPPEIPHATFKAMAYKEGTMLDCECKRGFRRIESGSLYMLCTGNSSHSSWDNQCQCTSSATRNTTKQVTPQPEEQKERKTTEMQSPMQPVDQASLPGHCREPPPWENEATERIYHFVVGQMVYYQCVQGYRALHRGPAESVCKMTHGKTRWTQPQLICTGE

SEQ ID NO: 320 - protein, 218 aa, Artificial Sequence; identical to SEQ ID NO: 230
  Fusion construct - activatable proprotein

SEQ ID NO: 321 - protein, 772 aa, Artificial Sequence
  Fusion construct - activatable proprotein
QVQLVQSGAEVKKPGASVKVSCKASGYTFTENIIHWVRQAPGQGLEWMGWIHPGSGSIKYAQKLQGRVTMTTDTSTSTAYMELRSLRSDDTAVYYCARHGGTGRGAMDYWGQGTLVTVSSASTKGPSVFPLAPSSKSTSGGTAALGCLVKDYFPEPVTVSWNSGALTSGVHTFPAVLQSSGLYSLSSVVTVPSSSLGTQTYICNVNHKPSNTKVDKKVEPKSCDKTHTCPPCPAPELLGGPSVFLFPPKPKDTLMISRTPEVTCVVVDVSHEDPEVKFNWYVDGVEVHNAKTKPREEQYNSTYRVVSVLTVLHQDWLNGKEYKCKVSNKALPAPIEKTISKAKGQPREPQVYTLPPSRDELTKNQVSLTCLVKGFYPSDIAVEWESNGQPENNYKTTPPVLDSDGSFFLYSKLTVDKSRWQQGNVFSCSVMHEALHNHYTQKSLSLSPGGGSPLGLAGGGSGGSTKKTQLQLEHLLLDLQMILNGINNYKNPKLTDMLTFEFYMPKKATELKHLQCLEEELKPLEEVLNLAQSKNFHLRPRDLISNINVIVLELKGSETTFMCEYADETATIVEFLNRWITFSQSIISTLTGGSGGSGRSDNQGGAELCDDRPPEIPHATFKAMAYKEGTMLNCKCKRGFRRIKSGSLYMLCTGNSSHSSWDNQCQCTSSATRNTTKQVTPQPEEQKERKTTEMQSPMQPVDQASLPGHCREPPPWENEATERIYHFVVGQMVYYQCVQGYRALHRGPAESVCKMTHGKTRWTQPQLICTGE

SEQ ID NO: 322 - protein, 218 aa, Artificial Sequence
  Fusion construct - activatable proprotein
EIVLTQSPGTLSLSPGERATLSCRASQSVSTSAYSYMHWYQQKPGQAPRLLIYLASNLESGIPDRFSGSGSGTDFTLTISRLEPEDFAVYYCQQSRELPYTFGQGTKLEIKRTVAAPSVFIFPPSDEQLKSGTASVVCLLNNFYPREAKVQWKVDNALQSGNSQESVTEQDSKDSTYSLSSTLTLSKADYEKHKVYACEVTHQGLSSPVTKSFNRGEC

SEQ ID NO: 323 - protein, 772 aa, Artificial Sequence
  Fusion construct - activatable proprotein
QVQLVQSGAEVKKPGASVKVSCKASGYTFTENIIHWVRQAPGQGLEWMGWIHPGSGSIKYAQKLQGRVTMTTDTSTSTAYMELRSLRSDDTAVYYCARHGGTGRGAMDYWGQGTLVTVSSASTKGPSVFPLAPSSKSTSGGTAALGCLVKDYFPEPVTVSWNSGALTSGVHTFPAVLQSSGLYSLSSVVTVPSSSLGTQTYICNVNHKPSNTKVDKKVEPKSCDKTHTCPPCPAPELLGGPSVFLFPPKPKDTLMISRTPEVTCVVVDVSHEDPEVKFNWYVDGVEVHNAKTKPREEQYNSTYRVVSVLTVLHQDWLNGKEYKCKVSNKALPAPIEKTISKAKGQPREPQVYTLPPSRDELTKNQVSLTCLVKGFYPSDIAVEWESNGQPENNYKTTPPVLDSDGSFFLYSKLTVDKSRWQQGNVFSCSVMHEALHNHYTQKSLSLSPGGGSGGSGGSGGSGGSTKKTQLQLEHLLLDLQMILNGINNYKNPKLTDMLTFEFYMPKKATELKHLQCLEEELKPLEEVLNLAQSKNFHLRPRDLISNINVIVLELKGSETTFMCEYADETATIVEFLNRWITFSQSIISTLTGGSGGSGGSGGSGGAELCDDRPPEIPHATFKAMAYKEGTMLNCKCKRGFRRIKSGSLYMLCTGNSSHSSWDNQCQCTSSATRNTTKQVTPQPEEQKERKTTEMQSPMQPVDQASLPGHCREPPPWENEATERIYHFVVGQMVYYQCVQGYRALHRGPAESVCKMTHGKTRWTQPQLICTGE

SEQ ID NO: 324 - protein, 218 aa, Artificial Sequence; identical to SEQ ID NO: 322
  Fusion construct - activatable proprotein

SEQ ID NO: 325 - protein, 772 aa, Artificial Sequence
  Fusion construct - activatable proprotein
QVQLVQSGAEVKKPGASVKVSCKASGYTFTENIIHWVRQAPGQGLEWMGWIHPGSGSIKYAQKLQGRVTMTTDTSTSTAYMELRSLRSDDTAVYYCARHGGTGRGAMDYWGQGTLVTVSSASTKGPSVFPLAPSSKSTSGGTAALGCLVKDYFPEPVTVSWNSGALTSGVHTFPAVLQSSGLYSLSSVVTVPSSSLGTQTYICNVNHKPSNTKVDKKVEPKSCDKTHTCPPCPAPELLGGPSVFLFPPKPKDTLMISRTPEVTCVVVDVSHEDPEVKFNWYVDGVEVHNAKTKPREEQYNSTYRVVSVLTVLHQDWLNGKEYKCKVSNKALPAPIEKTISKAKGQPREPQVYTLPPSRDELTKNQVSLTCLVKGFYPSDIAVEWESNGQPENNYKTTPPVLDSDGSFFLYSKLTVDKSRWQQGNVFSCSVMHEALHNHYTQKSLSLSPGGGSPLGLAGGGSGGSTKKTQLQLEHLLLDLQMILNGINNYKNPKLTDMLTAEFYMPKKATELKHLQCLEEELKPLEEVLNLAQSKNFHLRPRDLISNINVIVLELKGSETTFMCEYADETATIVEFLNRWITFSQSIISTLTGGSGGSGRSDNQGGAELCDDRPPEIPHATFKAMAYKEGTMLNCKCKRGFRRIKSGSLYMLCTGNSSHSSWDNQCQCTSSATRNTTKQVTPQPEEQKERKTTEMQSPMQPVDQASLPGHCREPPPWENEATERIYHFVVGQMVYYQCVQGYRALHRGPAESVCKMTHGKTRWTQPQLICTGE

SEQ ID NO: 326 - protein, 218 aa, Artificial Sequence; identical to SEQ ID NO: 322
  Fusion construct - activatable proprotein

SEQ ID NO: 327 - protein, 772 aa, Artificial Sequence
  Fusion construct - activatable proprotein
QVQLVQSGAEVKKPGASVKVSCKASGYTFTENIIHWVRQAPGQGLEWMGWIHPGSGSIKYAQKLQGRVTMTTDTSTSTAYMELRSLRSDDTAVYYCARHGGTGRGAMDYWGQGTLVTVSSASTKGPSVFPLAPSSKSTSGGTAALGCLVKDYFPEPVTVSWNSGALTSGVHTFPAVLQSSGLYSLSSVVTVPSSSLGTQTYICNVNHKPSNTKVDKKVEPKSCDKTHTCPPCPAPELLGGPSVFLFPPKPKDTLMISRTPEVTCVVVDVSHEDPEVKFNWYVDGVEVHNAKTKPREEQYNSTYRVVSVLTVLHQDWLNGKEYKCKVSNKALPAPIEKTISKAKGQPREPQVYTLPPSRDELTKNQVSLTCLVKGFYPSDIAVEWESNGQPENNYKTTPPVLDSDGSFFLYSKLTVDKSRWQQGNVFSCSVMHEALHNHYTQKSLSLSPGGGSGGSGGSGGSGGSTKKTQLQLEHLLLDLQMILNGINNYKNPKLTDMLTAEFYMPKKATELKHLQCLEEELKPLEEVLNLAQSKNFHLRPRDLISNINVIVLELKGSETTFMCEYADETATIVEFLNRWITFSQSIISTLTGGSGGSGGSGGSGGAELCDDRPPEIPHATFKAMAYKEGTMLNCKCKRGFRRIKSGSLYMLCTGNSSHSSWDNQCQCTSSATRNTTKQVTPQPEEQKERKTTEMQSPMQPVDQASLPGHCREPPPWENEATERIYHFVVGQMVYYQCVQGYRALHRGPAESVCKMTHGKTRWTQPQLICTGE

SEQ ID NO: 328 - protein, 218 aa, Artificial Sequence; identical to SEQ ID NO: 322
  Fusion construct - activatable proprotein

SEQ ID NO: 329 - protein, 772 aa, Artificial Sequence
  Fusion construct - activatable proprotein
QVQLVQSGAEVKKPGASVKVSCKASGYTFTENIIHWVRQAPGQGLEWMGWIHPGSGSIKYAQKLQGRVTMTTDTSTSTAYMELRSLRSDDTAVYYCARHGGTGRGAMDYWGQGTLVTVSSASTKGPSVFPLAPSSKSTSGGTAALGCLVKDYFPEPVTVSWNSGALTSGVHTFPAVLQSSGLYSLSSVVTVPSSSLGTQTYICNVNHKPSNTKVDKKVEPKSCDKTHTCPPCPAPELLGGPSVFLFPPKPKDTLMISRTPEVTCVVVDVSHEDPEVKFNWYVDGVEVHNAKTKPREEQYNSTYRVVSVLTVLHQDWLNGKEYKCKVSNKALPAPIEKTISKAKGQPREPQVYTLPPSRDELTKNQVSLTCLVKGFYPSDIAVEWESNGQPENNYKTTPPVLDSDGSFFLYSKLTVDKSRWQQGNVFSCSVMHEALHNHYTQKSLSLSPGGGSPLGLAGGGSGGSTKKTQLQLEHLLLDLQMILNGINNYKNPKLTRMLTFEFYMPKKATELKHLQCLEKELKPLEEVLNLAQSKNFHLRPRDLISNINVIVLELKGSETTFMCEYADETATIVEFLNRWITFSQSIISTLTGGSGGSGRSDNQGGAELCDDDPPEIPHATFKAMAYKEGTMLNCKCKRGFRRIESGSLYMLCTGNSSHSSWDNQCQCTSSATRNTTKQVTPQPEEQKERKTTEMQSPMQPVDQASLPGHCREPPPWENEATERIYHFVVGQMVYYQCVQGYRALHRGPAESVCKMTHGKTRWTQPQLICTGE

SEQ ID NO: 330 - protein, 218 aa, Artificial Sequence; identical to SEQ ID NO: 322
  Fusion construct - activatable proprotein

SEQ ID NO: 331 - protein, 772 aa, Artificial Sequence
  Fusion construct - activatable proprotein
QVQLVQSGAEVKKPGASVKVSCKASGYTFTENIIHWVRQAPGQGLEWMGWIHPGSGSIKYAQKLQGRVTMTTDTSTSTAYMELRSLRSDDTAVYYCARHGGTGRGAMDYWGQGTLVTVSSASTKGPSVFPLAPSSKSTSGGTAALGCLVKDYFPEPVTVSWNSGALTSGVHTFPAVLQSSGLYSLSSVVTVPSSSLGTQTYICNVNHKPSNTKVDKKVEPKSCDKTHTCPPCPAPELLGGPSVFLFPPKPKDTLMISRTPEVTCVVVDVSHEDPEVKFNWYVDGVEVHNAKTKPREEQYNSTYRVVSVLTVLHQDWLNGKEYKCKVSNKALPAPIEKTISKAKGQPREPQVYTLPPSRDELTKNQVSLTCLVKGFYPSDIAVEWESNGQPENNYKTTPPVLDSDGSFFLYSKLTVDKSRWQQGNVFSCSVMHEALHNHYTQKSLSLSPGGGSGGSGGSGGSGGSTKKTQLQLEHLLLDLQMILNGINNYKNPKLTRMLTFEFYMPKKATELKHLQCLEKELKPLEEVLNLAQSKNFHLRPRDLISNINVIVLELKGSETTFMCEYADETATIVEFLNRWITFSQSIISTLTGGSGGSGGSGGSGGAELCDDDPPEIPHATFKAMAYKEGTMLNCKCKRGFRRIESGSLYMLCTGNSSHSSWDNQCQCTSSATRNTTKQVTPQPEEQKERKTTEMQSPMQPVDQASLPGHCREPPPWENEATERIYHFVVGQMVYYQCVQGYRALHRGPAESVCKMTHGKTRWTQPQLICTGE

SEQ ID NO: 332 - protein, 218 aa, Artificial Sequence; identical to SEQ ID NO: 322
  Fusion construct - activatable proprotein

SEQ ID NO: 333 - protein, 772 aa, Artificial Sequence
  Fusion construct - activatable proprotein
QVQLVQSGAEVKKPGASVKVSCKASGYTFTENIIHWVRQAPGQGLEWMGWIHPGSGSIKYAQKLQGRVTMTTDTSTSTAYMELRSLRSDDTAVYYCARHGGTGRGAMDYWGQGTLVTVSSASTKGPSVFPLAPSSKSTSGGTAALGCLVKDYFPEPVTVSWNSGALTSGVHTFPAVLQSSGLYSLSSVVTVPSSSLGTQTYICNVNHKPSNTKVDKKVEPKSCDKTHTCPPCPAPELLGGPSVFLFPPKPKDTLMISRTPEVTCVVVDVSHEDPEVKFNWYVDGVEVHNAKTKPREEQYNSTYRVVSVLTVLHQDWLNGKEYKCKVSNKALPAPIEKTISKAKGQPREPQVYTLPPSRDELTKNQVSLTCLVKGFYPSDIAVEWESNGQPENNYKTTPPVLDSDGSFFLYSKLTVDKSRWQQGNVFSCSVMHEALHNHYTQKSLSLSPGGGSPLGLAGGGSGGSTKKTQLQLEHLLLDLQMILNGINNYKNPKLTRMLTAEFYMPKKATELKHLQCLEKELKPLEEVLNLAQSKNFHLRPRDLISNINVIVLELKGSETTFMCEYADETATIVEFLNRWITFSQSIISTLTGGSGGSGRSDNQGGAELCDDDPPEIPHATFKAMAYKEGTMLNCKCKRGFRRIESGSLYMLCTGNSSHSSWDNQCQCTSSATRNTTKQVTPQPEEQKERKTTEMQSPMQPVDQASLPGHCREPPPWENEATERIYHFVVGQMVYYQCVQGYRALHRGPAESVCKMTHGKTRWTQPQLICTGE

SEQ ID NO: 334 - protein, 218 aa, Artificial Sequence; identical to SEQ ID NO: 322
  Fusion construct - activatable proprotein

SEQ ID NO: 335 - protein, 772 aa, Artificial Sequence
  Fusion construct - activatable proprotein
QVQLVQSGAEVKKPGASVKVSCKASGYTFTENIIHWVRQAPGQGLEWMGWIHPGSGSIKYAQKLQGRVTMTTDTSTSTAYMELRSLRSDDTAVYYCARHGGTGRGAMDYWGQGTLVTVSSASTKGPSVFPLAPSSKSTSGGTAALGCLVKDYFPEPVTVSWNSGALTSGVHTFPAVLQSSGLYSLSSVVTVPSSSLGTQTYICNVNHKPSNTKVDKKVEPKSCDKTHTCPPCPAPELLGGPSVFLFPPKPKDTLMISRTPEVTCVVVDVSHEDPEVKFNWYVDGVEVHNAKTKPREEQYNSTYRVVSVLTVLHQDWLNGKEYKCKVSNKALPAPIEKTISKAKGQPREPQVYTLPPSRDELTKNQVSLTCLVKGFYPSDIAVEWESNGQPENNYKTTPPVLDSDGSFFLYSKLTVDKSRWQQGNVFSCSVMHEALHNHYTQKSLSLSPGGGSGGSGGSGGSGGSTKKTQLQLEHLLLDLQMILNGINNYKNPKLTRMLTAEFYMPKKATELKHLQCLEKELKPLEEVLNLAQSKNFHLRPRDLISNINVIVLELKGSETTFMCEYADETATIVEFLNRWITFSQSIISTLTGGSGGSGGSGGSGGAELCDDDPPEIPHATFKAMAYKEGTMLNCKCKRGFRRIESGSLYMLCTGNSSHSSWDNQCQCTSSATRNTTKQVTPQPEEQKERKTTEMQSPMQPVDQASLPGHCREPPPWENEATERIYHFVVGQMVYYQCVQGYRALHRGPAESVCKMTHGKTRWTQPQLICTGE

SEQ ID NO: 336 - protein, 218 aa, Artificial Sequence; identical to SEQ ID NO: 322
  Fusion construct - activatable proprotein

SEQ ID NO: 337 - protein, 772 aa, Artificial Sequence
  Fusion construct - activatable proprotein
QVQLVQSGAEVKKPGASVKVSCKASGYTFTENIIHWVRQAPGQGLEWMGWIHPGSGSIKYAQKLQGRVTMTTDTSTSTAYMELRSLRSDDTAVYYCARHGGTGRGAMDYWGQGTLVTVSSASTKGPSVFPLAPSSKSTSGGTAALGCLVKDYFPEPVTVSWNSGALTSGVHTFPAVLQSSGLYSLSSVVTVPSSSLGTQTYICNVNHKPSNTKVDKKVEPKSCDKTHTCPPCPAPELLGGPSVFLFPPKPKDTLMISRTPEVTCVVVDVSHEDPEVKFNWYVDGVEVHNAKTKPREEQYNSTYRVVSVLTVLHQDWLNGKEYKCKVSNKALPAPIEKTISKAKGQPREPQVYTLPPSRDELTKNQVSLTCLVKGFYPSDIAVEWESNGQPENNYKTTPPVLDSDGSFFLYSKLTVDKSRWQQGNVFSCSVMHEALHNHYTQKSLSLSPGGGSGGSGGSGGSGGSTKKTQLQLEHLLLDLQMILNGINNYKNPKLTDMLTFEFYMPKKATELKHLQCLEEELKPLEEVLNLAQSKNFHLRPRDLISNINVIVLELKGSETTFMCEYADETATIVEFLNRWITFSQSIISTLTGGSGGSGGSGGSGGAELCDDDPPEIPHATFKAMAYKEGTMLNCECKRGFRRIKSGSLYMLCTGNSSHSSWDNQCQCTSSATRNTTKQVTPQPEEQKERKTTEMQSPMQPVDQASLPGHCREPPPWENEATERIYHFVVGQMVYYQCVQGYRALHRGPAESVCKMTHGKTRWTQPQLICTGE

SEQ ID NO: 338 - protein, 218 aa, Artificial Sequence; identical to SEQ ID NO: 322
  Fusion construct - activatable proprotein

SEQ ID NO: 339 - protein, 772 aa, Artificial Sequence
  Fusion construct - activatable proprotein
QVQLVQSGAEVKKPGASVKVSCKASGYTFTENIIHWVRQAPGQGLEWMGWIHPGSGSIKYAQKLQGRVTMTTDTSTSTAYMELRSLRSDDTAVYYCARHGGTGRGAMDYWGQGTLVTVSSASTKGPSVFPLAPSSKSTSGGTAALGCLVKDYFPEPVTVSWNSGALTSGVHTFPAVLQSSGLYSLSSVVTVPSSSLGTQTYICNVNHKPSNTKVDKKVEPKSCDKTHTCPPCPAPELLGGPSVFLFPPKPKDTLMISRTPEVTCVVVDVSHEDPEVKFNWYVDGVEVHNAKTKPREEQYNSTYRVVSVLTVLHQDWLNGKEYKCKVSNKALPAPIEKTISKAKGQPREPQVYTLPPSRDELTKNQVSLTCLVKGFYPSDIAVEWESNGQPENNYKTTPPVLDSDGSFFLYSKLTVDKSRWQQGNVFSCSVMHEALHNHYTQKSLSLSPGGGSGGSGGSGGSGGSTKKTQLQLEHLLLDLQMILNGINNYKNPKLTDMLTAEFYMPKKATELKHLQCLEEELKPLEEVLNLAQSKNFHLRPRDLISNINVIVLELKGSETTFMCEYADETATIVEFLNRWITFSQSIISTLTGGSGGSGGSGGSGGAELCDDDPPEIPHATFKAMAYKEGTMLNCECKRGFRRIKSGSLYMLCTGNSSHSSWDNQCQCTSSATRNTTKQVTPQPEEQKERKTTEMQSPMQPVDQASLPGHCREPPPWENEATERIYHFVVGQMVYYQCVQGYRALHRGPAESVCKMTHGKTRWTQPQLICTGE

SEQ ID NO: 340 - protein, 218 aa, Artificial Sequence; identical to SEQ ID NO: 322
  Fusion construct - activatable proprotein

SEQ ID NO: 341 - protein, 772 aa, Artificial Sequence
  Fusion construct - activatable proprotein
QVQLVQSGAEVKKPGASVKVSCKASGYTFTENIIHWVRQAPGQGLEWMGWIHPGSGSIKYAQKLQGRVTMTTDTSTSTAYMELRSLRSDDTAVYYCARHGGTGRGAMDYWGQGTLVTVSSASTKGPSVFPLAPSSKSTSGGTAALGCLVKDYFPEPVTVSWNSGALTSGVHTFPAVLQSSGLYSLSSVVTVPSSSLGTQTYICNVNHKPSNTKVDKKVEPKSCDKTHTCPPCPAPELLGGPSVFLFPPKPKDTLMISRTPEVTCVVVDVSHEDPEVKFNWYVDGVEVHNAKTKPREEQYNSTYRVVSVLTVLHQDWLNGKEYKCKVSNKALPAPIEKTISKAKGQPREPQVYTLPPSRDELTKNQVSLTCLVKGFYPSDIAVEWESNGQPENNYKTTPPVLDSDGSFFLYSKLTVDKSRWQQGNVFSCSVMHEALHNHYTQKSLSLSPGGGSGGSGGSGGSGGSTKKTQLQLEHLLLDLQMILNGINNYKNPKLTRMLTFEFYMPKKATELKHLQCLEKELKPLEEVLNLAQSKNFHLRPRDLISNINVIVLELKGSETTFMCEYADETATIVEFLNRWITFSQSIISTLTGGSGGSGGSGGSGGAELCDDDPPEIPHATFKAMAYKEGTMLNCECKRGFRRIKSGSLYMLCTGNSSHSSWDNQCQCTSSATRNTTKQVTPQPEEQKERKTTEMQSPMQPVDQASLPGHCREPPPWENEATERIYHFVVGQMVYYQCVQGYRALHRGPAESVCKMTHGKTRWTQPQLICTGE

SEQ ID NO: 342 - protein, 218 aa, Artificial Sequence; identical to SEQ ID NO: 322
  Fusion construct - activatable proprotein

SEQ ID NO: 343 - protein, 772 aa, Artificial Sequence
  Fusion construct - activatable proprotein
QVQLVQSGAEVKKPGASVKVSCKASGYTFTENIIHWVRQAPGQGLEWMGWIHPGSGSIKYAQKLQGRVTMTTDTSTSTAYMELRSLRSDDTAVYYCARHGGTGRGAMDYWGQGTLVTVSSASTKGPSVFPLAPSSKSTSGGTAALGCLVKDYFPEPVTVSWNSGALTSGVHTFPAVLQSSGLYSLSSVVTVPSSSLGTQTYICNVNHKPSNTKVDKKVEPKSCDKTHTCPPCPAPELLGGPSVFLFPPKPKDTLMISRTPEVTCVVVDVSHEDPEVKFNWYVDGVEVHNAKTKPREEQYNSTYRVVSVLTVLHQDWLNGKEYKCKVSNKALPAPIEKTISKAKGQPREPQVYTLPPSRDELTKNQVSLTCLVKGFYPSDIAVEWESNGQPENNYKTTPPVLDSDGSFFLYSKLTVDKSRWQQGNVFSCSVMHEALHNHYTQKSLSLSPGGGSGGSGGSGGSGGSTKKTQLQLEHLLLDLQMILNGINNYKNPKLTRMLTAEFYMPKKATELKHLQCLEKELKPLEEVLNLAQSKNFHLRPRDLISNINVIVLELKGSETTFMCEYADETATIVEFLNRWITFSQSIISTLTGGSGGSGGSGGSGGAELCDDDPPEIPHATFKAMAYKEGTMLNCECKRGFRRIKSGSLYMLCTGNSSHSSWDNQCQCTSSATRNTTKQVTPQPEEQKERKTTEMQSPMQPVDQASLPGHCREPPPWENEATERIYHFVVGQMVYYQCVQGYRALHRGPAESVCKMTHGKTRWTQPQLICTGE

SEQ ID NO: 344 - protein, 218 aa, Artificial Sequence; identical to SEQ ID NO: 322
  Fusion construct - activatable proprotein

SEQ ID NO: 345 - protein, 120 aa, Artificial Sequence
  Made in Lab - FAP antibody sequence
EVQLVQSGAEVKKPGESLKISCKGSGYTFTENIIHWVRQMPGKGLEWIGWFHPGSGSIKYNEKFKDQVTISADKSISTAYLQWSSLKASDTAMYFCARHGGTGRGAMDYWGQGTLVTVSS

SEQ ID NO: 346 - protein, 120 aa, Artificial Sequence
  Made in Lab - FAP antibody sequence
QVQLVQSGAEVKKPGASVKVSCKASGYTFTENIIHWVRQAPGQGLEWMGWIHPGSGSIKYAQKLQGRVTMTTDTSTSTAYMELRSLRSDDTAVYYCARHGGTGRGAMDYWGQGTLVTVSS

SEQ ID NO: 347 - protein, 111 aa, Artificial Sequence
  Made in Lab - FAP antibody sequence
DIVMTQTPLSLSVTPGQPASISCRASKSVSTSAYSYMHWYLQKPGQSPQLLIYLASNLESGVPDRFSGSGSGTDFTLKISRVEAEDVGVYYCQHSRELPYTFGQGTKLEIK

SEQ ID NO: 348 - protein, 111 aa, Artificial Sequence
  Made in Lab - FAP antibody sequence
EIVLTQSPGTLSLSPGERATLSCRASQSVSTSAYSYMHWYQQKPGQAPRLLIYLASNLESGIPDRFSGSGSGTDFTLTISRLEPEDFAVYYCQQSRELPYTFGQGTKLEIK

SEQ ID NO: 349 - protein, 111 aa, Artificial Sequence
  Made in Lab - FAP antibody sequence
EIVLTQSPGTLSLSPGERATLSCRASQSVSTSAYSYMHWYQQKPGQAPRLLIYLASNRETGIPDRFSGSGSGTDFTLTISRLEPEDFAVYYCQQSRELPYTFGQGTKLEIK

SEQ ID NO: 350 - protein, 449 aa, Artificial Sequence
  Made in Lab - FAP antibody sequence
EVQLVQSGAEVKKPGESLKISCKGSGYTFTENIIHWVRQMPGKGLEWIGWFHPGSGSIKYNEKFKDQVTISADKSISTAYLQWSSLKASDTAMYFCARHGGTGRGAMDYWGQGTLVTVSSASTKGPSVFPLAPSSKSTSGGTAALGCLVKDYFPEPVTVSWNSGALTSGVHTFPAVLQSSGLYSLSSVVTVPSSSLGTQTYICNVNHKPSNTKVDKKVEPKSCDKTHTCPPCPAPEAAGGPSVFLFPPKPKDTLMISRTPEVTCVVVDVSHEDPEVKFNWYVDGVEVHNAKTKPREEQYNSTYRVVSVLTVLHQDWLNGKEYKCKVSNKALAAPIEKTISKAKGQPREPQVYTLPPSRDELTKNQVSLTCLVKGFYPSDIAVEWESNGQPENNYKTTPPVLDSDGSFFLYSKLTVDKSRWQQGNVFSCSVMHEALHNHYTQKSLSLSPG

SEQ ID NO: 351 - protein, 449 aa, Artificial Sequence
  Made in Lab - FAP antibody sequence
QVQLVQSGAEVKKPGASVKVSCKASGYTFTENIIHWVRQAPGQGLEWMGWIHPGSGSIKYAQKLQGRVTMTTDTSTSTAYMELRSLRSDDTAVYYCARHGGTGRGAMDYWGQGTLVTVSSASTKGPSVFPLAPSSKSTSGGTAALGCLVKDYFPEPVTVSWNSGALTSGVHTFPAVLQSSGLYSLSSVVTVPSSSLGTQTYICNVNHKPSNTKVDKKVEPKSCDKTHTCPPCPAPEAAGGPSVFLFPPKPKDTLMISRTPEVTCVVVDVSHEDPEVKFNWYVDGVEVHNAKTKPREEQYNSTYRVVSVLTVLHQDWLNGKEYKCKVSNKALAAPIEKTISKAKGQPREPQVYTLPPSRDELTKNQVSLTCLVKGFYPSDIAVEWESNGQPENNYKTTPPVLDSDGSFFLYSKLTVDKSRWQQGNVFSCSVMHEALHNHYTQKSLSLSPG

SEQ ID NO: 352 - protein, 214 aa, Artificial Sequence
  Made in Lab - FAP antibody sequence
DIQMTQSPSSLSASVGDRVTITCRASQDVNTAVAWYQQKPGKAPKLLIYSASFLYSGVPSRFSGSRSGTDFTLTISSLQPEDFATYYCQQHYTTPPTFGQGTKVEIKRTVAAPSVFIFPPSDEQLKSGTASVVCLLNNFYPREAKVQWKVDNALQSGNSQESVTEQDSKDSTYSLSSTLTLSKADYEKHKVYACEVTHQGLSSPVTKSFNRGEC

SEQ ID NO: 353 - protein, 218 aa, Artificial Sequence; identical to SEQ ID NO: 322
  Made in Lab - FAP antibody sequence

SEQ ID NO: 354 - protein, 218 aa, Artificial Sequence
  Made in Lab - FAP antibody sequence
EIVLTQSPGTLSLSPGERATLSCRASQSVSTSAYSYMHWYQQKPGQAPRLLIYLASNRETGIPDRFSGSGSGTDFTLTISRLEPEDFAVYYCQQSRELPYTFGQGTKLEIKRTVAAPSVFIFPPSDEQLKSGTASVVCLLNNFYPREAKVQWKVDNALQSGNSQESVTEQDSKDSTYSLSSTLTLSKADYEKHKVYACEVTHQGLSSPVTKSFNRGEC
